(19) United States
(12) Patent Application Publication
(10) Pub. No.: US 2006/0178326 A1
(43) Pub. Date: Aug. 10, 2006

(54) Ribozyme therapy for the treatment of proliferative skin and eye diseases

(76) Inventors: Joan M. Robbins, San Diego, CA (US); Richard Tritz, San Diego, CA (US)

Correspondence Address: LAW OFFICE OF DAVID SPOLTER;ATTN: Gilda Singer, Suite 5M, 30 South Adelaide Avenue, Highland Park, NJ, 08904, US

(21) Appl. No.: 10/753,718

(22) Filed: Jan. 8, 2004

Related U.S. Application Data
(62) Division of application No. 09/696,791, filed on Oct. 25, 2000, now Pat. No. 6,770,633.
(60) Provisional application No. 60/161,532, filed on Oct. 26, 1999.

(51) Int. Cl. A61K 48/00; A61K 38/46

(52) U.S. Cl. 514/44; 424/94.6

(57) ABSTRACT

As an effective therapy for proliferative skin and eye diseases such as psoriasis and proliferative diabetic retinopathy, this invention provides ribozymes and ribozyme delivery systems which cleave RNA encoding cytokines involved in inflammation, matrix metalloproteinases, a cyclin, a cell-cycle dependent kinase, a growth factor, or a reductase.

### CROSS REFERENCE TO RELATED APPLICATION

[0001] This application claims the benefit of U.S. Provisional Patent Application No. 60/161,532 filed Oct. 26, 1999, where this provisional application is incorporated herein by reference in its entirety.

### TECHNICAL FIELD

[0002] The present invention relates generally to therapeutics, and more specifically, to compositions and methods which may be utilized in the treatment and/or prevention of proliferative skin and eye diseases such as psoriasis and proliferative retinopathy. BACKGROUND OF THE INVENTION

[0003] Proliferative skin diseases such as psoriasis affect as many as 2 to 3% of the entire U.S. population, with more than 250,000 new cases being diagnosed each year. The cost of treating psoriasis in the United States alone is estimated to range between three and five billion dollars per year, thus representing a major health cost to the health care system. Although the cause of psoriasis is presently unknown, there is evidence which tends to suggest that it is a polygenetic autoimmune disorder.

[0004] Proliferative skin diseases such as psoriasis are characterized by itchy, inflamed, scaly lesions which bleed easily. Although there are a wide variety of topical treatments (e.g., coal tar preparations, steroid-based creams and ointments) and systemic treatments (e.g., ultraviolet radiation, PUVA, steroids, and chemotherapeutic agents such as methotrexate), at present there is no cure for psoriasis. Further, presently available treatments are generally unsatisfactory, in that remission rates are high and certain therapeutic regimens have potentially serious side effects.

[0005] Proliferative diseases of the eye such as proliferative diabetic retinopathy (PDR) affect as many as 700,000 in the U.S., with more than 65,000 new cases diagnosed each year. Annually, as many as 25,000 people go blind from the disorder, making it a leading cause of blindness among working-age Americans. The cost savings from successful intervention could be as high as 100 million dollars per year. The disease does not stem from a single retinal change. Rather, it may be triggered by a combination of biochemical, metabolic, and hematological abnormalities.

[0006] There are no early symptoms. There is no pain, no blurred vision, and no ocular inflammation. In fact, many people do not develop any visual impairment until the disease has advanced well into its proliferative stage. At this point, the vision that has been lost cannot be restored. Laser surgery, also called photocoagulation, is the only current therapy to treat PDR. At present there is no cure for this disease.

[0007] Scarring is a significant source of disfigurement, pain, and increased medical costs for affected patients. It is the result of abnormal events during wound healing that can result in tissue overgrowth characterized by hyperproliferation of fibroblasts and excessive deposition of matrix. In surgery, scar tissue formation and contraction is a major clinical problem. Likewise, scarring following accidental burning or other injuries or trauma often has serious results, causing impaired function and unsightly aesthetic effects. Currently, there are no satisfactory treatments to prevent scarring.

[0008] Thus, a need exists for an effective therapy to treat proliferative diseases (e.g., psoriasis, PDR and scarring). The present invention satisfies this need and further provides other related advantages as well.

### SUMMARY OF THE INVENTION

[0009] Briefly stated, the present invention provides ribozymes and ribozyme delivery systems which are able to inhibit the mechanisms involved in proliferation of cells associated with proliferative skin and eye diseases such as psoriasis, PDR and scarring. Accordingly, the present invention ribozymes are provided which are suitable for treating scarring and proliferative diseases by inhibiting a cytokine involved in inflammation, a matrix metalloproteinase involved in extracellular matrix elaboration, a cyclin, a cell-cycle dependent kinase, a growth factor involved in cell cycle regulation, or a reductase.

[0010] Within one aspect of the invention, such methods generally comprise the step of administering to a patient a therapeutically effective amount of ribozyme which cleaves RNA encoding a cytokine involved in inflammation, a matrix metalloproteinase, a cyclin, a cell-cycle dependent kinase, a growth factor, or a reductase such that said proliferative skin disease is treated. Within a related aspect, methods of treating proliferative skin disease are provided comprising the step of administering to a patient an effective amount of nucleic acid molecule comprising a promoter operably linked to a nucleic acid segment encoding a ribozyme which cleaves RNA encoding a cytokine involved in inflammation, a matrix metalloproteinase, a cyclin, a cell-cycle dependent kinase, a growth factor, or a reductase such that said proliferative skin disease is treated. Representative examples of proliferative skin diseases include psoriasis, atopic dermatitis, actinic keratosis, squamous or basal cell carcinoma, viral or seborrheic wart.

[0011] Within other aspects, such methods generally comprise the step of administering to a patient a therapeutically effective amount of ribozyme which cleaves RNA encoding a cytokine involved in inflammation, a matrix metalloproteinase, a cyclin, a cell-cycle dependent kinase, or a growth factor such that said proliferative eye disease is treated. Within a related aspect, methods of treating proliferative eye disease are provided comprising the step of administering to a patient an effective amount of nucleic acid molecules comprising a promoter operably linked to a nucleic acid segment encoding a ribozyme which cleaves RNA encoding a cytokine involved in inflammation, a matrix metalloproteinase, a cyclin, a cell-cycle dependent kinase, a growth factor, or a reductase such that said proliferative eye disease is treated. Representative examples of proliferative eye diseases include proliferative diabetic retinopathy, proliferative vitreoretinopathy, proliferative sickle cell retinopathy, retinopathy of prematurity and retinal detachment.

[0012] Within other aspects, methods are provided for treating or preventing scarring, comprising administering to a patient a therapeutically effective amount of ribozyme which cleaves RNA encoding a cytokine involved in inflammation, a matrix metalloproteinase, a cyclin, a cell-cycle dependent kinase, a growth factor, or a reductase such that said scarring is treated or prevented. Within another related aspect, methods are provided for treating or preventing scarring, comprising administering to a patient an effective amount of nucleic acid molecule comprising a promoter operably linked to a nucleic acid segment encoding a ribozyme which cleaves RNA encoding a cytokine involved in inflammation, a matrix metalloproteinase, a cyclin, a cell-cycle dependent kinase, a growth factor, or a reductase such that said scarring is treated or prevented. Representative examples of diseases or injuries which cause scarring include keloids, adhesions (e.g., surgical adhesions), hypertrophic burn scars, and trauma (e.g., blunt trauma or surgical trauma).

[0013] Cyclins and cell-cycle dependent kinases are directly involved in the check point control of cell division leading to proliferation. Particularly preferred cyclins or cell-cycle dependent kinases include CDK1, CDK2, CDK4, Cyclin B 1, Cyclin D and PCNA.

[0014] Infection or injury induces a complex cascade of events including activation of the clotting pathway, adherence of immune cells to the endothelium, induction of proliferation and migration of cells into the injury site to rapidly repair the insult. These responses are mediated by certain cytokines and growth factors released from the injured tissue and by hematopoetic cells; Chronic inflammation develops when cytokines and growth factors continue to be produced, resulting in an exaggerated healing response. Particularly preferred cytokines include the inflammatory cytokines interleukin 1 alpha and beta, interleukin 2, interleukin 6, interleukin 8, interferon gamma, and tumor necrosis factor. Particularly preferred growth factors include vascular endothelial growth factor (VEGF), and platelet derived growth factor (PDGF).

[0015] Matrix metalloproteinases, along with their corresponding inhibitors, tissue inhibitors of metalloproteinases or TIMP, are involved in the repair of injured tissue. The balance between the proteinases and the inhibitors regulates the pattern and extent of wound healing. Excessive production of MMP or insufficient production of TIMP results in abnormal wound healing. Particularly preferred matrix metalloproteinases include MMP 1, MMP 2, MMP 3 and MMP 9.

[0016] Preferably, the ribozyme is a hammerhead or hairpin ribozyme, representative examples of which recognize the target site sequences set forth below and in the Examples. In preferred embodiments, the present invention also provides nucleic acid molecule encoding such ribozymes; further preferably, the nucleic acid is DNA or cDNA. Even further preferably, the nucleic acid molecule is under the control of a promoter to transcribe the nucleic acid.

[0017] In one embodiment of the invention, nucleic acid molecules are described which encode the ribozymes provided herein. Preferably, the vector is a plasmid, a virus, retrotransposon, a cosmid or a retrovirus. In one embodiment where the vector is a retroviral vector, the nucleic acid molecule encoding the ribozyme under the control of a promoter, which is preferably a pol III promoter, further preferably a human tRNA^{Va1} promoter or an adenovirus VA1 promoter, is inserted between the 5′ and 3′ long terminal repeat sequences of the retrovirus.

[0018] These and other aspects of the present invention will become evident upon reference to the following detailed description and attached drawings. In addition, various references are set forth herein that describe in more detail certain procedures or compositions (e.g., plasmids, etc.), and are therefore incorporated by reference in their entirety as if each were individually noted for incorporation.

### BRIEF DESCRIPTION OF THE DRAWINGS

[0019] FIG. 1 is a schematic illustration of which shows the general structure of a chimeric DNA/RNA ribozyme (SEQ ID NOs: 4385 and 4386).

[0020] FIG. 2 is a photograph of a gel which shows the stability of chimeric ribozymes PN30003, 30004, and 30005 in human vascular smooth muscle cell lysate.

[0021] FIG. 3 is a photograph of a gel which shows the stability of chimeric ribozymes PN30003 and 30005 in serum.

[0022] FIG. 4 is a schematic illustration of a propanediol linker.

[0023] FIG. 5 is a schematic illustration of vector pLNT-Rz.

[0024] FIG. 6 is a schematic illustration of a representative hairpin ribozyme (SEQ ID NOs: 4387 and 4388).

[0025] FIG. 7 is a photograph of treated and control skin from a porcine model of scar formation.

[0026] FIGS. 8A-8C are photographs of control eyes and eyes treated with chimeric PCNA targeted ribozyme from a rabbit dispase model of proliferative vitreoretinopathy.

[0027] FIG. 9 is a chart of the cumulative transdermal absorption of ³²P-ribozyme presented as the percent of the applied dose recovered in the reservoir of diffusion chambers.

[0028] FIG. 10 is a chart of the cumulative transdermal absorption of ³²P-ribozyme presented as total micrograms recovered in the reservoir of diffusion chambers.

[0029] FIG. 11 is a chart of the localization of ³²P-ribozyme in various skin compartments presented as percent of the applied dose recovered in each compartment.

[0030] FIG. 12 is a chart of the localization of ³²P-ribozyme in various skin compartments presented as total micrograms in each compartment.

[0031] FIG. 13 is a chart of histopathologic scoring of chimeric PCNA targeted ribozyme versus control treated rabbit eyes. Scoring is based on a modified Fastenberg scale (Table 22) and performed blindly by two trained observers. P is less than 0.0008 by T test.

[0032] FIG. 14A and FIG. 14B are two photographs of a surgical wound model in pig skin. FIG. 14A shows the dimensions of the wound (approximately 3 cm long, 5 mm deep and 6 mm wide). FIG. 14B shows excision of the skin and closure with a single suture.

### DETAILED DESCRIPTION OF THE INVENTION

### DEFINITIONS

[0033] Prior to setting forth the invention, it may be helpful to an understanding thereof to first set forth definitions of certain terms that will be used hereinafter.

[0034] “Ribozyme” refers to a nucleic acid molecule which is capable of cleaving a specific nucleic acid sequence. Ribozymes may be composed of RNA, DNA, nucleic acid analogues (e.g., phosphorothioates), or any combination of these (e.g., DNA/RNA chimerics). Within particularly preferred embodiments, a ribozyme should be understood to refer to RNA molecules that contain anti-sense sequences for specific recognition, and an RNA-cleaving enzymatic activity.

[0035] “Ribozyme gene” refers to a nucleic acid molecule (e.g., DNA) consisting of the ribozyme sequence which, when transcribed into RNA, will yield the ribozyme.

[0036] “Vector” refers to an assembly which is capable of expressing a ribozyme of interest. The vector may be composed of either deoxyribonucleic acids (“DNA” ) or ribonucleic acids (“RNA”). Optionally, the vector may include a polyadenylation sequence, one or more restriction sites, as well as one or more selectable markers such as neomycin phosphotransferase, hygromycin phosphotransferase or puromycin-N-acetyl-transferase. Additionally, depending on the host cell chosen and the vector employed, other genetic elements such as an origin of replication, additional nucleic acid restriction sites, enhancers, sequences conferring inducibility of transcription, and selectable markers, may also be incorporated into the vectors described herein.

[0037] “Nucleic acid” or “nucleic acid molecule” refers to any of deoxyribonucleic acid (DNA), ribonucleic acid (RNA), oligonucleotides, fragments generated by the polymerase chain reaction (PCR), and fragments generated by any of ligation, scission, endonuclease action, and exonuclease action. Nucleic acids can be composed of monomers that are naturally-occurring nucleotides (such as deoxyribonucleotides and ribonucleotides), or analogs of naturally-occurring nucleotides (e.g., α-enantiomeric forms of naturally-occurring nucleotides), or a combination of both. Modified nucleotides can have modifications in sugar moieties and/or in pyrimidine or purine base moieties. Sugar modifications include, for example, replacement of one or more hydroxyl groups with halogens, alkyl groups, amines, and azido groups, or sugars can be functionalized as ethers or esters. Moreover, the entire sugar moiety can be replaced with sterically and electronically similar structures, such as aza-sugars and carbocyclic sugar analogs. Examples of modifications in a base moiety include alkylated purines and pyrimidines, acylated purines or pyrimidines, or other well-known heterocyclic substitutes. Nucleic acid monomers can be linked by phosphodiester bonds or analogs of such linkages. Analogs of phosphodiester linkages include phosphorothioate, phosphorodithioate, phosphoroselenoate, phosphorodiselenoate, phosphoroanilothioate, phosphoranilidate, phosphoramidate, and the like. The term “nucleic acid” also includes so-called “peptide nucleic acids,” which comprise naturally-occurring or modified nucleic acid bases attached to a polyamide backbone. Nucleic acids can be either single stranded or double stranded.

[0038] “Isolated nucleic acid molecule” is a nucleic acid molecule that is not integrated in the genomic DNA of an organism. For example, a DNA molecule that encodes a gene that has been separated from the genomic DNA of a eukaryotic cell is an isolated DNA molecule. Another example of an isolated nucleic acid molecule is a chemically-synthesized nucleic acid molecule that is not integrated in the genome of an organism.

[0039] “Promoter” is a nucleotide sequence that directs the transcription of a structural gene. Typically, a promoter is located in the 5′ region of a gene, proximal to the transcriptional start site of a structural gene. If a promoter is an inducible promoter, then the rate of transcription increases in response to an inducing agent. In contrast, the rate of transcription is not regulated by an inducing agent if the promoter is a constitutive promoter.

[0040] As noted above, proliferative diseases such as psoriasis, PDR, and scarring affect many individuals and represent a major cost to the health care system. As discussed in more detail below, by interfering with cell-cycle control of cells which might otherwise proliferate, proliferative diseases such as psoriasis or PDR can be effectively treated. This invention accomplishes such by providing ribozymes and methods of using ribozymes that inhibit the activity of cytokines which are involved in inflammation, matrix metalloproteinases, cyclins, cell-cycle dependent kinases, growth factors, reductases, all of which directly or indirectly contribute to proliferation.

[0041] Cyclins and cell-cycle dependent kinases are directly involved in the signaling and synthesis that results in cells progressing through the cell cycle to replicate. Representative examples of suitable ribozyme targets include cdk1 ribozyme binding sites (SEQ ID NOS: 1-149); cdk2 ribozyme binding sites (SEQ ID NOS: 150-3010); cdk3 ribozyme binding sites (SEQ ID NOS: 302-405); cdk4 ribozyme binding sites (SEQ ID NOS: 406-526); cdk6 ribozyme binding sites (SEQ ID NOS: 527-665); cdk7 ribozyme binding sites (SEQ ID NOS: 666-866); cdk8 ribozyme binding sites (SEQ ID NOS: 867-1112); cdk-we-hu ribozyme binding sites (SEQ ID NOS: 1113-1408); cyclin A2 ribozyme binding sites (SEQ ID NOS: 1409-1614); cyclin C ribozyme binding sites (SEQ ID NOS: 1615-1819); cyclin D1 ribozyme binding sites (SEQ ID NOS: 1820-1889); cyclin D2 ribozyme binding sites (SEQ ID NOS: 1890-1975); cyclin D3 ribozyme binding sites (SEQ ID NOS: 1976-2053); cyclin E ribozyme binding sites (SEQ ID NOS: 2054-2318); cyclin F ribozyme binding sites (SEQ ID NOS: 2319-2561); cyclin G1 ribozyme binding sites (SEQ ID NOS: 2562-2787); cyclin H ribozyme binding sites (SEQ ID NOS: 2788-2964); cyclin A1 ribozyme binding sites (SEQ ID NOS: 2965-3257); cyclin B1 ribozyme binding sites (SEQ ID NOS: 3258-3478); cdc25 hs ribozyme binding sites (SEQ ID NOS: 3479-3854); PCNA HH ribozyme binding sites (SEQ ID NOS: 3855-4115); and chimeric hairpin ribozymes: SEQ ID NOS: 4116-4119).

[0042] As noted above, infection or injury induces a complex cascade of events including activation of the clotting pathway, adherence of immune cells to the endothelium, induction of proliferation and migration of cells into the injury site to rapidly repair the insult. These responses are mediated by certain cytokines and growth factors released from the injured tissue and by hematopoetic cells. Chronic inflammation develops when cytokines and growth factors continue to be produced, resulting in an exaggerated healing response. Particularly preferred cytokines include the inflammatory cytokines interleukin 1 alpha and beta, interleukin 2, interleukin 6, interleukin 8, interferon gamma, and tumor necrosis factor. Particularly preferred growth factors include vascular endothelial growth factor (VEGF), and platelet derived growth factor (PDGF).

[0043] Matrix metalloproteinases, along with their corresponding inhibitors, tissue inhibitors of metalloproteinases or TIMP, are involved in a the repair of injured tissue. The balance between the proteinases and the inhibitors regulates the pattern and extent of wound healing. Excessive production of MMP or insufficient production of TIMP results in abnormal wound healing. Particularly preferred matrix metalloproteinases include MMP 1, MMP 2, MMP 3 and MMP 9.

### RIBOZYMES

[0044] As noted above, the present invention provides ribozymes having the ability to cleave or otherwise inhibit nucleic acid molecules which are either directly, or indirectly (e.g., they encode proteins) involved in cell-cycle control. Several different types of ribozymes may be constructed for use within the present invention, including for example, hammerhead ribozymes (Rossi, J. J. et al., Pharmac. Ther. 50:245-254, 1991) (Forster and Symons, Cell 48:211-220, 1987; Haseloff and Gerlach, Nature 328:596-600, 1988; Walbot and Bruening, Nature 334:196, 1988; Haseloff and Gerlach, Nature 334:585, 1988; Haseloff et al., U.S. Pat. No. 5,254,678), hairpin ribozymes (Hampel et al., Nucl. Acids Res. 18:299-304, 1990, and U.S. Pat. No. 5,254,678), hepatitis delta virus ribozymes (Perrotta and Been, Biochem. 31:16, 1992), Group I intron ribozymes (Cech et al., U.S. Pat. No. 4,987,071) and RNase P ribozymes (Takada et al., Cell 35:849, 1983); (see also, WO 95/29241, entitled “Ribozymes with Product Ejection by Strand Displacement”; and WO 95/31551, entitled “Novel Enzymatic RNA Molecules.”

[0045] Cech et al. (U.S. Pat. No.4,987,071, issued Jan. 22, 1991) has disclosed the preparation and use of ribozymes which are based on the properties of the Tetrahymena ribosomal RNA self-splicing reaction. These ribozymes require an eight base pair target site and free guanosine (or guanosine derivatives). A temperature optimum of 50° C. is reported for the endoribonuclease activity. The fragments that arise from cleavage contain 5′-phosphate and 3′-hydroxyl groups and a free guanosine nucleotide added to the 5′-end of the cleaved RNA.

[0046] In contrast to the ribozymes of Cech et al., particularly preferred ribozymes of the present invention hybridize efficiently to target sequences at physiological temperatures, making them suitable for use in vivo, and not merely as research tools (see column 15, lines 18 to 42, of Cech et al., U.S. Pat. No. 4,987,071). Thus, particularly preferred ribozymes for use within the present invention include hairpin ribozymes (for example, as described by Hampel et al., European Patent Publication No. 0 360 257, published Mar. 26, 1990) and hammerhead ribozymes. Briefly, the sequence requirement for the hairpin ribozyme is any RNA sequence consisting of NNNBN*GUC(N)ₓ (Sequence ID Nos. 4120-4124) (where x is any number from 6 to 10, N*G is the cleavage site, B is any of G, C, or U, and N is any of G, U, C, or A). Representative examples of recognition or target sequences for hairpin ribozymes are set forth below in the Examples. Additionally, the backbone or common region of the hairpin ribozyme can be designed using the nucleotide sequence of the native hairpin ribozyme (Hampel et al., Nucl. Acids Res. 18:299-304, 1990) or it can be modified to include a “tetraloop” structure that increases stability and catalytic activity (see Example 2; see also Yu et al., Virology 206:381-386, 1995; Cheong et al., Nature 346:680-682, 1990; Anderson et al., Nucl. Acids Res. 22:1096-1100, 1994).

[0047] The sequence requirement at the cleavage site for the hammerhead ribozyme is any RNA sequence consisting of NUH (where N is any of G, U, C, or A and H represents C, U, or A) can be targeted. Accordingly, the same target within the hairpin leader sequence, GUC, is useful for the hammerhead ribozyme. The additional nucleotides of the hammerhead ribozyme or hairpin ribozyme is determined by the target flanking nucleotides and the hammerhead consensus sequence (see Ruffner et al., Biochemistry 29:10695-10702, 1990). This information, along with the sequences and disclosure provided herein, enables the production of hairpin ribozymes of this invention.

[0048] The ribozymes of this invention, as well as DNA encoding such ribozymes and other suitable nucleic acid molecules, described in more detail below, can be chemically synthesized using methods well known in the art for the synthesis of nucleic acid molecules (see e.g., Heidenreich et al., J. FASEB 70(1):90-6, 1993; Sproat, Curr. Opin. Biotechnol. 4(1):20-28, 1993). Alternatively, commercial suppliers such as Promega, Madison, Wis., USA, provide a series of protocols suitable for the production of nucleic acid molecules such as ribozymes.

[0049] Within one aspect of the present invention, ribozymes are prepared from a DNA molecule or other nucleic acid molecule (which, upon transcription, yields an RNA molecule) operably linked to an RNA polymerase promoter, e.g., the promoter for T7 RNA polymerase or SP6 RNA polymerase. Accordingly, also provided by this invention are nucleic acid molecules, e.g., DNA or cDNA, coding for the ribozymes of this invention. When the vector also contains an RNA polymerase promoter operably linked to the DNA molecule, the ribozyme can be produced in vitro upon incubation with the RNA polymerase and appropriate nucleotides. In a separate embodiment, the DNA may be inserted into an expression cassette, such as described in Cotten and Bimstiel, EMBO J. 8(12):3861-3866, 1989, and in Hempel et al., Biochemistry 28:4929-4933, 1989. A more detailed discussion of molecular biology methodology is disclosed in Sambrook et al., Molecular Cloning: A Laboratory Manual, Cold Spring Harbor Press, 1989.

[0050] During synthesis, the ribozyme can be modified by ligation to a DNA molecule having the ability to stabilize the ribozyme and make it resistant to RNase (Rossi et al., Pharmac. Ther. 50:245-254, 1991). In another embodiment, the ribozyme can be modified to a phosphothio-analog for use in liposome delivery systems. This modification also renders the ribozyme resistant to endonuclease activity. In yet another embodiment, the ribozyme can be modified to contain propanediol linkages or to incorporate 2′-O-methylated nucleotides.

### VECTORS

[0051] Use of ribozymes to treat proliferative skin diseases such as psoriasis or eczema involves introduction of functional ribozyme to the infected cell of interest. This can be accomplished by either synthesizing functional ribozyme in vitro prior to delivery, or, by delivery of DNA capable of driving ribozyme synthesis in vivo.

[0052] More specifically, within other aspects of the invention the ribozyme gene may be constructed within a vector which is suitable for introduction to a host cell (e.g., prokaryotic or eukaryotic cells in culture or in the cells of an organism). Appropriate prokaryotic and eukaryotic cells can be transfected with an appropriate transfer vector containing the nucleic acid molecule encoding a ribozyme of this invention.

[0053] To produce the ribozymes with a vector in vivo, nucleotide sequences coding for ribozymes are preferably placed under the control of a eukaryotic promoter such as pol III (e.g., tRNA or VA-1 from adenovirus), CMV, SV40 late, or SV40 early promoters. Within certain embodiments, the promoter may be a tissue or cell-specific promoter. Ribozymes may thus be produced directly from the transfer vector in vivo.

[0054] A wide variety of vectors may be utilized within the context of the present invention, including for example, plasmids, viruses, retrotransposons and cosmids. Representative examples include adenoviral vectors (e.g., WO 94/26914, WO 93/9191; Yei et al., Gene Therapy 1:192-200, 1994; Kolls et al., PNAS 91(1):215-219, 1994; Kass-Eisler et al., PNAS 90(24):11498-502, 1993; Guzman et al., Circulation 88(6):2838-48, 1993; Guzman et al., Cir. Res. 73(6):1202-1207, 1993; Zabner et al., Cell 75(2):207-216, 1993; Li et al., Hum Gene Ther. 4(4):403-409, 1993; Caillaud et al., Eur. J. Neurosci. 5(10):1287-1291, 1993), adeno-associated type I (“AAV-1”) or adeno-associated type 2 (“AAV-2”) vectors (see WO 95/13365; Flotte et al., PNAS 90(22):10613-10617, 1993), hepatitis delta vectors, live, attenuated delta viruses and herpes viral vectors (e.g., U.S. Pat. No. 5,288,641), as well as vectors which are disclosed within U.S. Pat. No. 5,166,320. Other representative vectors include retroviral vectors (e.g., EP 0 415 731; WO 90/07936; WO 91/02805; WO 94/03622; WO 93/25698; WO 93/25234; U.S. Pat. No. 5,219,740; WO 93/11230; WO 93/10218). General methods of using such vectors in gene therapy are well known in the art (see, for example, Larrick, J. W. and Burck, K. L., Gene Therapy: Application of Molecular Biology, Elsevier Science Publishing Co., Inc., New York, N.Y., 1991 and Kreigler, M., Gene Transfer and Expression: A Laboratory Manual, W. H. Freeman and Company, New York, 1990).

[0055] Further provided by this invention are vectors having more than one nucleic acid molecule encoding a ribozyme of this invention, each molecule under the control of a separate eukaryotic promoter (or, an Internal Ribosome Entry Site or “IRES”) or alternatively, under the control of single eukaryotic promoter. Representative examples of other nucleic acid molecules which may be delivered by the vectors of the present invention include therapeutic molecules such as interferon (e.g., alpha, beta or gamma), as well as a wide variety of other cytokines or growth factors, and facilitators which assist or aid ribozymes in cleaving a target sequence by unwinding or otherwise limiting secondary folding which might otherwise inhibit the ribozyme. These vectors provide the advantage of providing multi-functional therapy against Psoriasis, preferably with the various therapies working together in synergy.

[0056] Host prokaryotic and eukaryotic cells stably harboring the vectors described above also are provided by this invention. Suitable host cells include bacterial cells, rat cells, mouse cells, and human cells.

### DELIVERY

[0057] Within certain aspects of the invention, ribozyme molecules, or nucleic acid molecules which encode the ribozyme, may be introduced into a host cell or administered to a patient utilizing a vehicle, or by various physical methods. Representative examples of such methods include transformation using calcium phosphate precipitation (Dubensky et al., PNAS 81:7529-7533, 1984), direct microinjection of such nucleic acid molecules into intact target cells (Acsadi et al., Nature 352:815-818, 1991), and electroporation whereby cells suspended in a conducting solution are subjected to an intense electric field in order to transiently polarize the membrane, allowing entry of the nucleic acid molecules. Other procedures include the use of nucleic acid molecules linked to an inactive adenovirus (Cotton et al., PNAS 89:6094, 1990), lipofection (Felgner et al., Proc. Natl. Acad. Sci. USA 84:7413-7417, 1989), microprojectile bombardment (Williams et al., PNAS 88:2726-2730, 1991), polycation compounds such as polylysine, receptor specific ligands, liposomes entrapping the nucleic acid molecules, spheroplast fusion whereby E. coli containing the nucleic acid molecules are stripped of their outer cell walls and fused to animal cells using polyethylene glycol, viral transduction, (Cline et al., Pharmac. Ther 29:69, 1985; and Friedmann et al., Science 244:1275, 1989), and DNA ligand (Wu et al, J. of Biol. Chem. 264:16985-16987, 1989). In one embodiment, the ribozyme is introduced into the host cell using a liposome.

[0058] Within further embodiments of the invention, additional therapeutic molecules (e.g., interferon) or facilitators may be delivered utilizing the methods described herein. Such delivery may be either simultaneous to, or before or after the delivery of a ribozyme or vector expressing ribozymes.

### PHARMACEUTICAL COMPOSITIONS

[0059] As noted above, pharmaceutical compositions (or “medicaments”) also are provided by this invention. These compositions contain any of the above described ribozymes, DNA molecules, vectors or host cells, along with a pharmaceutically or physiologically acceptable carrier, excipient, or, diluent. Generally, such carriers should be nontoxic to recipients at the dosages and concentrations employed. Ordinarily, the preparation of such compositions entails combining the therapeutic agent with buffers, antioxidants such as ascorbic acid, low molecular weight (less than about 10 residues) polypeptides, proteins, amino acids, carbohydrates including glucose, sucrose or dextrins, chelating agents such as EDTA, glutathione and other stabilizers and excipients. Neutral buffered saline or saline mixed with nonspecific serum albumin are exemplary appropriate diluents. Particularly preferred carriers include cholesterols such as DOTAP:cholesterol.

[0060] Additional ingredients added to the compositions for the express purpose of inhibiting endogenous ribonucleases include reducing agents such as dithiothreitol, detergents such as sodium dodecyl sulfate, and other agents such as vanidyl nucleotides, aurin tricarbocylic acid, hydrogen peroxide and RNA decoys such as tRNA.

[0061] Pharmaceutical compositions of the present invention may also be prepared to contain, or express (e.g., if a vector), one or more additional therapeutic molecules (e.g., interferon) or facilitators.

[0062] The pharmaceutical compositions of the present invention may be prepared for administration by a variety of different routes, including for example, topically, intradermally, or intraocullarly. In addition, pharmaceutical compositions of the present invention may be placed within containers, along with packaging material which provides instructions regarding the use of such pharmaceutical compositions. Generally, such instructions will include a tangible expression describing the reagent concentration, as well as within certain embodiments, relative amounts of excipient ingredients or diluents (e.g., water, saline or PBS) which may be necessary to reconstitute the pharmaceutical composition Pharmaceutical compositions of the present invention are useful for both diagnostic and therapeutic purposes.

### THERAPEUTIC METHODS

[0063] Methods of treating proliferative diseases such as psoriasis or PDR are also provided by this invention. More specifically, within one aspect of the present invention proliferative diseases such as psoriasis or PDR may be treated by administering to a warm-blooded animal (e.g., a human) a therapeutically effective amount of ribozyme, and/or, nucleic acid molecule or vector which encodes the ribozyme.

[0064] Briefly, cells in response to injury or other insult typically follow at least one of two possible pathways: normal wound healing or exaggerated growth. For normal wound healing accelerated growth and maturation of cells occurs in order to allow healing of the wound as soon as possible.

[0065] Proliferative diseases such as psoriasis, scarring and PDR are similar in many respects to the process of wound healing. Namely, cells are created and migrate in a relatively short period of time. However, if the proliferation is too rapid or the signals to proliferate continue for too long a period of time, the cells build up to form thickened lesions. This growth is supported by new blood vessels, as well as the infiltration of a variety of lymphocytes which produce a wide variety of growth factors (that further increases the proliferation of the cells). These cells can produce tissue degrading enzymes which cause the destruction of surrounding tissue. In some cases, the thickened lesions contract, distorting the surface of the skin or retina. The result of the exaggerated growth is the clinical symptoms associated with the proliferative disease.

[0066] The present invention provides the treatment of proliferative skin and eye diseases by contacting desired cells with an effective amount of ribozyme of this invention or, alternatively, by transducing the cell with an effective amount of vector having a nucleic acid molecule encoding the ribozyme. A suitable “therapeutically effective amount” will depend on the nature and extent of diseased tissue being treated, or, if a medical procedure is contemplated in which abnormal proliferation can be expected, prevented. Such “therapeutically effective amounts” can be readily determined by those of skill in the art using well known methodology, and suitable animal models (e.g. a rat, rabbit, or porcine model), or, based upon clinical trials. As utilized herein, a patient is deemed to be “treated” if the proliferative skin or eye disease is reversed or inhibited in a patient in a quantifiable manner. Further, a therapeutically effective amount or regimen of treatment should result in: (1) decrease in the frequency, severity, or, duration of clinical symptoms (e.g., inflammation, thickening of the tissue, contraction, scaling, “burning”, or itching); (2) increase of time in the period of remission; (3) a change in pathological symptoms (e.g., inhibition of keratinocyte, fibroblast, glia, or retinal pigment epithelium proliferation); (4) prevention of retinal detachment; and/or (5) prevention of visual impairment.

[0067] When exogenously delivering the ribozyme, the RNA molecule can be embedded within a stable RNA molecule or in another form of protective environment, such as a liposome. Alternatively, the RNA can be embedded within RNase-resistant DNA counterparts. Cellular uptake of the exogenous ribozyme can be enhanced by attaching chemical groups to the DNA ends, such as cholesteryl moieties (Letsinger et al., P.N.A.S., U.S.A., 1989).

[0068] In another aspect of the invention, the target cell is transduced under conditions favoring insertion of the vector into the target cell and stable expression of the nucleic acid encoding the ribozyme. The target cell can include but is not limited to cells found in the skin basal level, dermis, or epidermis; the vitreous of the eye, and the retinal and pigment epithelium layers of the eye.

[0069] In addition, the ribozyme, ribozyme gene or vector may be readily incorporated into a biodegradable polymer, sphere, pleuroinc gel, or the like to aid incorporation into cells.

[0070] The ribozyme (or nucleic acid molecule or vector encoding the ribozyme) can be administered in any manner sufficient to achieve the above therapeutic results, but preferred methods include topical and systemic administration. Patients with localized disease can be administered ribozymes (or a nucleic acid molecule or vector) in a topical cream, ointment or emollient applied directly to skin lesions. For example, a topical cream containing 100 milligrams ribozymes by weight can be administered depending upon severity of the disease and the patient's response to treatment. In a preferred embodiment, a topical preparation containing ribozymes 100 milligrams by weight would be administered to psoriatic lesions. Alternatively, direct intracutaneous or intraocular injection of ribozymes in a suitable pharmaceutical vehicle can be used for the management of individual lesions.

[0071] The ribozyme may be formulated along with a liquid (e.g., DOTAP:cholesterol). In addition, the ribozyme may be formulated with ribonuclease inhibitors, including, but not limited to, reducing agent (e.g., dithiothreitol), detergent (e.g., sodium dodecyl sulfate), vanidyl nucleotides, aurin tricarboxcylic acid, hydrogen peroxide, and RNA decoys (e.g., tRNAs).

[0072] The following examples are offered by way of illustration, and not by way of limitation.

### EXAMPLES

### Example 1

### Criteria for Ribozyme Site Selection

A. Selection of Sites for Hairpin Ribozymes

[0073] Hairpin ribozymes suitable for use within the present invention preferably recognize the following sequence of RNA: NNNBNGUCNNNNNNNN (SEQ ID NO:4122) wherein the ribozyme is constructed so as to be complementary to the underlined sequences, and wherein B is C, G or U. The sequence GUC must be conserved for all hairpin ribozymes described below. Other nucleotides (“N” as underlined above) preferably have a high degree of sequence conservation in order to limit the need for multiple ribozymes against the same target site.

Selection of Cleavage Sites for Hammerhead Ribozymes

[0074] Hammerhead ribozymes suitable for use within the present invention preferably recognize NUH, wherein N is any of G, U, C, or A and H is C, U, or A. The hairpin recognition sites GUC are a subset of the hammerhead recognition sites NUH. Therefore, all hairpin sites are by definition also hammerhead sites, although the converse is not true. Representative GUC hairpin/hammerhead ribozyme recognition sites for various genes are provided below in Tables 1-16. Hammerhead only sites are shown in Table 18.

TABLE 1

Hairpin/Hammerhead Ribozyme
Recognition Sites for cdc 2 kinase

| | | |
|---|---|---|
| NUCL. POS. | SEQUENCE (5′ to 3′) | I.D. No. |

| | | |
|---|---|---|
| 175 | ACTTCGTCATCCAAAT | 4125 |
| 189 | ATATAGTCAGTCTTCA | 4126 |
| 193 | AGTCAGTCTTCAGGAT | 4127 |
| 289 | TCCTGGTCAGTACATG | 4128 |
| 355 | GTTTTGTCACTCTAGA | 4129 |
| 530 | CTGGGGTCAGCTCGTT | 4130 |

[0075] TABLE 2

Hairpin/Hammerhead Ribozyme
Recognition Sites for Cyclin B1

| | | |
|---|---|---|
| NUCL. POS. | SEQUENCE (5′ to 3′) | I.D. No. |

| | | |
|---|---|---|
| 13 | TCCGAGTCACCAGGAA | 4131 |
| 282 | CCAGTGTCTGAGCCAG | 4132 |
| 428 | CCTGTGTCAGGCTTTC | 4133 |
| 559 | AAGCAGTCAGACCAAA | 4134 |
| 581 | ACTGGGTCGGGAAGTC | 4135 |
| 679 | TGACTGTCTCCATTAT | 4136 |
| 745 | TTGGTGTCACTGCCAT | 4137 |
| 887 | CTTTGGTCTGGGTCGG | 4138 |
| 893 | TCTGGGTCGGCCTCTA | 4139 |
| 1107 | TACCTGTCATATACTG | 4140 |
| 1162 | ATGTAGTCATGGTAAA | 4141 |
| 1198 | TGACTGTCAAGAACAA | 4142 |

[0076] TABLE 3

Hairpin/Hammerhead Ribozyme
Recognition Sites for PCNA

| | | |
|---|---|---|
| UCL. POS. | SEQUENCE (5′ to 3′) | I.D. No. |

| | | |
|---|---|---|
| −131 | GAGTGGTCGTTGTCTT | 4143 |
| −125 | TCGTTGTCTTTCTAGG | 4144 |
| 19 | GCCTGGTCCAGGGCTC | 4145 |
| 126 | GACTCGTCCCACGTCT | 4146 |
| 159 | CTGCGGTCTGAGGGCT | 4147 |
| 546 | AAATTGTCACAGACAA | 4148 |
| 868 | TTTCTGTCACCAAATT | 4149 |
| 983 | ATCTGGTCTAGTTAAC | 4150 |
| 1008 | TTTTTGTCTCTTAGAA | 4151 |
| 1047 | AAAGGGTCTTGACTCT | 4152 |

[0077] TABLE 4

Hairpin/Hammerhead Ribozyme
Recognition Sites for MMP-1

| | | |
|---|---|---|
| NUCL. POS. | SEQUENCE (5′ to 3′) | I.D. No. |

| | | |
|---|---|---|
| 48 | GTGG TGTC TCACAGCT | 4389 |
| 301 | AGTT TGTC CTCACTGA | 4390 |
| 454 | CCAA GGTC TCTGAGGG | 4391 |
| 464 | TGAG GGTC AAGCAGAC | 4392 |
| 799 | ATCC TGTC CAGCCCAT | 4393 |
| 1446 | TGTG AGTC CAAAGAAG- | 4394 |
| 1475 | GAAC TGTC TATTTTCT | 4395 |
| 1488 | TCTC AGTC ATTTTTAA | 4396 |
| 1507 | CTAG AGTC ACTGATAC | 4397 |
| 1766 | CATG AGTC TTTGCCGG | 4398 |

[0078] TABLE 5

Hairpin/Hammerhead Ribozyme
Recognition Sites for IL-1 beta

| | | |
|---|---|---|
| UCL. POS. | SEQUENCE (5′ to 3′) | I.D. No. |

| | | |
|---|---|---|
| 13 | caag tgtctgaagcag | 4399 |
| 195 | gccg cgtcagttgttg | 4400 |
| 408 | gtga tgtctggtccat | 4401 |
| 413 | gtct ggtccatatgaa | 4402 |
| 480 | tcca tgtcctttgtac | 4403 |
| 555 | tacc tgtcctgcgtgt | 4404 |
| 646 | gatt tgtcttcaacaa | 4405 |
| 687 | tttg agtctgcccagt | 4406 |
| 782 | tgcc cgtcttcctggg | 4407 |
| 801 | tttg tgtcttcctaaa | 4408 |
| 830 | agag agtcctgtgctg | 4409 |
| 921 | ctgt tgtctacaccaa | 4410 |

[0079] TABLE 6

Hairpin/Hammerhead Ribozyme
Recognition Sites for VEGF

| | | |
|---|---|---|
| UCL. POS. | SEQUENCE (5′ to 3′) | I.D. No. |

| | | |
|---|---|---|
| 83 | CTGCTgtcTTGGGTGC | 4411 |
| 136 | AAGTGgtcCCAGGCTG | 4412 |
| 364 | GAGGAgtcCAACATCA | 4413 |

[0080] TABLE 7

Hairpin/Hammerhead Ribozyme
Recognition Sites for IL2

| | | |
|---|---|---|
| UCL. POS. | SEQUENCE (5′ to 3′) | I.D. No. |

| | | |
|---|---|---|
| 68 | caactcctgtcttgcattgca | 4414 |
| 96 | ttgcacttgtcacaaacagtg | 4415 |
| 289 | gcttcagtgtctagaagaaga | 4416 |
| 450 | taccttttgtcaaagcatcat | 4417 |

[0081] TABLE 8

Hairpin/Hammerhead Ribozyme
Recognition Sites for IFN gamma

| | | |
|---|---|---|
| UCL. POS. | SEQUENCE (5′ to 3′) | I.D. No. |

| | | |
|---|---|---|
| 246 | gccaaattgtctccttttact | 4418 |
| 458 | gctgaactgtcgccagcagct | 4419 |
| 493 | aaaaaggagtcagatgctgtt | 4420 |
| 534 | gtaatggttgtcctgcctgcaa | 4421 |
| 718 | ctgtgactgtctcacttaatc | 4422 |
| 958 | ttgaatgtgtcaggtgaccct | 4423 |

[0082] TABLE 9

Hairpin/Hammerhead Ribozyme
Recognition Sites for IL 1 alpha

| | | |
|---|---|---|
| UCL. POS. | SEQUENCE (5′ to 3′) | I.D. No. |

| | | |
|---|---|---|
| 19 | GCGTTTGAGTCAGCAAAGAAG | 4424 |
| 120 | GATCATCTGTCTCTGAATCAG | 4425 |
| 192 | CAATCTGTGTCTCTGAGTATC | 4426 |
| 860 | GGTCTGGAGTCTCACTTGTCT | 4427 |
| 869 | TCTCACTTGTCTCACTTGTGC | 4428 |
| 938 | TACTGTTAGTCATTTGCTGAG | 4429 |
| 1624 | GCATTTTGGTCCAAGTTGTGC | 4430 |
| 1729 | AGTAATTGGTCCGATCTTTGA | 4431 |
| 1921 | CCGTGCTGGTCTCGAACTTCT | 4432 |
| 2063 | AATCCTCAGTCAGCCGTGTTT | 4433 |
| 2404 | TTCTTGTCCCAAATAAAA | 4434 |

[0083] TABLE 10

Hairpin/Hammerhead Ribozyme
Recognition Sites for IL6

| | | |
|---|---|---|
| NUCL. POS. | SEQUENCE (5′ to 3′) | I.D. No. |

| | | |
|---|---|---|
| 79 | CGCCTTCGGTCCAGTTGCCTT | 4435 |
| 403 | CATCACTGGTCTTTTGGAGTT | 4436 |
| 659 | TTCCTGCAGTCCAGCCTGAGG | 4437 |
| 736 | TTCTTCTGGTCAGAAACCTGT | 4438 |
| 747 | AGAAACCTGTCCACTGGGCAC | 4439 |

[0084] TABLE 11

Hairpin/Hammerhead Ribozyme
Recognition Sites for IL8

| | | |
|---|---|---|
| NUCL. POS. | SEQUENCE (5′ to 3′) | I.D. No. |

| | | |
|---|---|---|
| 493 | ttgtgtgggtctgttgtaggg | 4440 |
| 832 | agagctctgtctggaccccaa | 4441 |
| 873 | caaccctagtctgctagccag | 4442 |

[0085] TABLE 12

Hairpin/Hammerhead Ribozyme
Recognition Sites for MMP2

| | | |
|---|---|---|
| UCL. POS. | SEQUENCE (5′ to 3′) | I.D. No. |

| | | |
|---|---|---|
| 46 | GCCGCGCCGTCGCCCATCATC | 4443 |
| 614 | GCCAAGTGGTCCGTGTGAAGT | 4444 |
| 774 | CGGCTTCTGTCCCCATGAAGC | 4445 |
| 1001 | CCCCCTGTGTCTTCCCCTTCA | 4446 |
| 1248 | GAACTTCCGTCTGTCCCAGGA | 4447 |
| 1252 | TTCCGTCTGTCCCAGGATGAC | 4448 |
| 1343 | TGGGCCCTGTCACTCCTGAGA | 4449 |
| 1811 | TGGATGCCGTCGTGGACCTGC | 4450 |
| 1832 | GGGCGGCGGTCACAGCTACTT | 4451 |
| 2312 | TGGAGACTGTCTCAAGAGGGC | 4452 |
| 2472 | TTCTTTGGGTCTTGTTTTTTT | 4453 |

[0086] TABLE 13

Hairpin/Hammerhead Ribozyme
Recognition Sites for MMP3

| | | |
|---|---|---|
| UCL. POS. | SEQUENCE (5′ to 3′) | I.D. No. |

| | | |
|---|---|---|
| 8 | atgaagagtcttccaatcct | 4454 |
| 173 | ggacagtggtcctgttgttaa | 4455 |
| 293 | tgacgttggtcacttcagaac | 4456 |
| 674 | ctccctgggtctctttcactc | 4457 |
| 753 | ttccgcctgtctcaagatgat | 4458 |
| 780 | ggcattcagtccctctatgga | 4459 |
| 838 | cggaacctgtccctccagaac | 4460 |
| 882 | cctgctttgtcctttgatgct | 4461 |
| 895 | ttgatgctgtcagcactctga | 4462 |

[0087] TABLE 14

Hairpin/Hammerhead Ribozyme
Recognition Sites for MMP 9

| | | |
|---|---|---|
| UCL. POS. | SEQUENCE (5′ to 3′) | I.D. No. |

| | | |
|---|---|---|
| 41 | agcccctggtcctggtgctcc | 4463 |
| 94 | cagcgccagtccacccttgtg | 4464 |
| 208 | cgtggagagtcgaaatctctg | 4465 |
| 253 | aagcaactgtccctgcccgag | 4466 |
| 320 | ggtgcggggtcccagacctgg | 4467 |
| 518 | cagacatcgtcatccagtttg | 4468 |
| 533 | agtttggtgtcgcggagcacg | 4469 |
| 649 | gagttgtggtccctgggcaag | 4470 |
| 665 | gcaagggcgtcgtggttccaa | 4471 |
| 762 | caccgacggtcgctccgacgg | 4472 |
| 936 | cacggacggtcgctccgacgg | 4473 |
| 1061 | agctgtgcgtcttccccttca | 4474 |
| 1350 | cctctatggtcctcgccctga | 4475 |
| 1418 | ccccgacggtctgccccaccg | 4476 |
| 1442 | cccccactgtccacccctcag | 4477 |
| 1548 | gcctttgagtccggtggacga | 4478 |
| 1727 | tggactcggtctttgaggagc | 4479 |
| 1798 | acaggcgcgtcggtgctgggc | 4480 |
| 1818 | cccgaggcgtctggacaagct | 4481 |
| 2151 | gggctcccgtcctgctttgca | 4482 |

[0088] TABLE 15

Hairpin/Hammerhead Ribozyme
Recognition Sites for PDGF A

| | | |
|---|---|---|
| UCL. POS. | SEQUENCE (5′ to 3′) | I.D. No. |

| | | |
|---|---|---|
| 29 | ccggccgggtcgctcctgaag | 4483 |
| 125 | ccccttccgtccccaccccca | 4484 |
| 241 | cgggcgccgtccgccagctcc | 4485 |
| 494 | ggcccgcagtcagatccacag | 4486 |
| 589 | ctcacggggtccatgccacta | 4487 |
| 661 | aggaagctgtccccgctgtct | 4488 |
| 670 | tccccgctgtctgcaagacca | 4489 |
| 688 | ccaggacggtcatttacgaga | 4490 |
| 710 | tcctcggagtcaggtcgaccc | 4491 |
| 799 | cgagcagtgtcaagtgccagc | 4492 |
| 820 | cctcccgcgtccaccaccgca | 4493 |
| 835 | accgcagcgtcaaggtggcca | 4494 |
| 981 | cctagggagtcaggtaaaaaa | 4495 |
| 1140 | agtgtgcggtctttgttctcc | 4496 |
| 1168 | aaaactgtgtccgagaacact | 4497 |
| 1269 | gcttccttgtcaaaaagagag | 4498 |

[0089] TABLE 16

Hairpin/Hammerhead Ribozyme
Recognition Sites for PDGF B

| | | |
|---|---|---|
| UCL. POS. | SEQUENCE (5′ to 3′) | I.D. No. |

| | | |
|---|---|---|
| 106 | aggttggagtcccctgggcgc | 4499 |
| 437 | ggcccggagtcggcatgaatc | 4500 |
| 469 | ctcttcctgtctctctgctgc | 4501 |
| 489 | ctacctgcgtctggtcagcgc | 4502 |
| 494 | tgcgtctggtcagcgccgagg | 4503 |
| 893 | tgcgacctgtccaggtgagaa | 4504 |
| 1085 | cggtgcgagtccgccggcccc | 4505 |
| 1265 | tttccctcgtccgtctgtctc | 4506 |
| 1269 | cctcgtccgtctgtctcgatg | 4507 |
| 1273 | gtccgtctgtctcgatgcctg | 4508 |
| 1325 | ctccacgtgtccgtccaccct | 4509 |
| 1329 | acgtgtccgtccacccttcca | 4510 |
| 1349 | atcagcgggtctcctcccag | 4511 |
| 1476 | ctgatggggtcgctctttggg | 4512 |
| 1545 | tgtggactgtcctgaggagcc | 4513 |

[0090] TABLE 17
Further Ribozyme Recognition Sites

| | |
|---|---|
| TARGET SITE | I.D. No. |

| | |
|---|---|
| cdk1 ribozyme binding sites: | 1-149 |
| cdk2 ribozyme binding sites: | 150-301 |
| cdk3 ribozyme binding sites: | 302-405 |
| cdk4 ribozyme binding sites: | 406-526 |
| cdk6 ribozyme binding sites: | 527-665 |
| cdk7 ribozyme binding sites: | 666-866 |
| cdk8 ribozyme binding sites: | 867-1112 |
| cdk-we-hu ribozyme binding sites: | 1113-1408 |
| cyclin A2 ribozyme binding sites: | 1409-1614 |
| cyclin C ribozyme binding sites: | 1615-1819 |
| cyclin D1 ribozyme binding sites: | 1820-1889 |
| cyclin D2 ribozyme binding sites: | 1890-1975 |
| cyclin D3 ribozyme binding sites: | 1976-2053 |
| cyclin E ribozyme binding sites: | 2054-2318 |
| cyclin F ribozyme binding sites: | 2319-2561 |
| cyclin G1 ribozyme binding sites: | 2562-2787 |
| cyclin H ribozyme binding sites: | 2788-2964 |
| cyclin A1 ribozyme binding sites: | 2965-3257 |
| cyclin B1 ribozyme binding sites: | 3258-3478 |
| cdc25 hs ribozyme binding sites: | 3479-3854 |
| PCNA HH ribozyme binding sites: | 3855-4115 |
| Example chimeric hairpin ribozymes: | 4116-4119 |

[0091] TABLE 18
Hammerhead Ribozyme Recognition Sites for VEGF

| | | |
|---|---|---|
| UCL. POS. | SEQUENCE (5′ to 3′) | I.D. No. |

| | | |
|---|---|---|
| 118 | TGCTGCTCtACCTCCACCATG | 4514 |
| 206 | TCATGGATGtCTATCAGCGC | 4515 |
| 254 | GGACATCTtCCAGGAGTAC | 4516 |
| 287 | GTACATCTtCAAGCCATCC | 4517 |
| 386 | CATGCAGATtATGCGGATC | 4518 |
| 402 | ATCAAACCtCACCAAGGCC | 4519 |
| 434 | GATGAGCTtCCTACAGCAC | 4520 |
| 451 | AGAAAAAAAAtCAGTTCGAGG | 4521 |
| 541 | GCAAGAAAtCCCGGTATAA | 4522 |
| 663 | GTACAAGAtCCGCAGACGT | 4523 |

### Example 2

### Construction of Hairpin Ribozymes

[0092] Two single-stranded DNA oligonucleotides are chemically synthesized such that, when combined and converted into double-stranded DNA, they contain the entire hairpin ribozyme, including nucleotides complementary to the target site. In addition, restriction enzyme recognition sites may be placed on either end to facilitate subsequent cloning. More specifically, the oligonucleotides are hybridized together and converted to double-stranded DNA using either Klenow DNA polymerase or Taq DNA polymerase. The resulting DNA is cleaved with restriction enzymes BamHI and MluI, purified and cloned into vectors for in vitro transcription (pGEM, ProMega, Madison, Wis.) or for retrovirus production and mammalian expression (pLNL/MJT backbone). Representative hairpin ribozymes are set forth below (note that the underlined sequences indicate the sites wherein the ribozyme binds the target sequence):

cdc-2 530

(Sequence I.D. No. 4378)

5′
AACGAGCTAGAACCAGACCAGAGAAACACACGTTGTGGTATATTACCTGG
TA 3′
Cyclin B1 281

(Sequence I.D. No. 4379)

5′
CTGGCTCAAGAACTGGACCAGAGAAACACACGTTGTGGTATATTACCTGG
TA 3′
PCNA 158

(Sequence 1.D. No. 4381)

5′
AGCCCTCAAGAAGCAGACCAGAGAAACACACGTTGTGGTATATTACCTGG
TA 3′

[0093] Defective ribozymes for use as controls may be constructed as described above, with the exception that the sequence AAA is changed to a UGC as shown in FIG. 1.

### Example 3

### Construction of Hammerhead Ribozymes

[0094] Chimeric hammerhead ribozymes (i.e., RNA/DNA hybrids) are designed to have an appropriate NUH sequence for ribozyme cleavage. Ribozymes are chemically synthesized with the general structure shown in FIG. 1. The binding arms bases and stem loop comprise DNA, and the catalytic domain comprises RNA and/or 2′O methyl RNA bases. Specific examples of synthetic human hammerhead ribozymes targeting PCNA are shown below (DNA bases shown in upper case, RNA bases as lower case, 2′ O methyl RNA as lower case italics, and propanediol shown as pr pr pr pr):

Sequence ID No. 4382: PN30003 PCN1-HH Length: 40
5′ GAGCCCTG cugaugag CAATTTTTTG cgaaa ACCAGGCGC 3′
Sequence ID No. 4383: PN30004 OptPCN1-ome HH Length: 38
5′ AGCCC ug cuga u g agg CCGTAAGG cc ga a a cc AGGCGC 3′
Sequence ID No. 4384: PN30005 StabPCN1-ome HH Length: 38
5′ AGCCC ugcu ga u g agg CCGTAAGG cc ga a a cc AGGCGC 3′
Sequence ID No. 4385: PN30006 PCN1-ome HH p4 Length: 28
5′ AGCCC ug cuga u g ag pr pr pr pr c ga a a cc AGGCGC 3′

[0095] Alteration of the base composition at the stem loop and catalytic domain increases the catalytic activity of the chimeric ribozyme as assayed by in vitro cleavage (EXAMPLE 5). The substitution of 2′ O methyl bases for RNA bases enhances the stability of the chimeric ribozymes. The assay consists of incubating 10 μg of ribozyme with 100 μl of cell lysate at 37° C. for times ranging from 30 seconds to 240 minutes, then separating the intact ribozyme from degradation products on a 15% PAGE, staining with SYBRgreen (Molecular Probes, Eugene, Oreg.), and quantifying by phosphorimager analysis (Molecular Dynamics).

[0096] By making specific base modifications to the structure of the ribozymes, the half-life in cell lysate was increased sequentially from approximately 2.5 hours for PN30003, to 3.5 hours for PN30004, and to greater than 10 hours for PN30005 (FIG. 2). In serum, the half-life of PN30003 is less than 30 seconds. Specific base modifications to ribozyme PN30005 increased the half-life in serum to greater than 4 hours (FIG. 3). The internal stem loop structure can be substituted with a propanediol linkage to shorten the molecule, facilitating delivery, and enhancing catalytic activity (FIG. 4).

[0097] A scrambled sequence polynucleotide including the same composition of ribonucleotides and deoxyribonucleotides is also synthesized for each ribozyme to serve as a control with no catalytic activity. Lipofectin may be utilized to enhance the uptake of ribozyme into the cells.

### Example 4

### Construction of Ribozyme Mammalian Expression Vectors

[0098] Plasmid pMJT (Yu et al., Proc. Nat'l Acad. Sci. USA 90:6340-6344, 1993), which contains the anti-U5 HIV ribozyme driven by the tRNA^{Va1} RNA pol III promoter, is digested with BamHI and MluI, and the vector purified from the ribozyme fragment. The hairpin ribozymes, as described above, are excised from the pGem vector with BamHI and MluI, purified, and ligated into the empty pMJT vector. The resulting vector is designated pLNT-Rz (see FIG. 5, and contains the Moloney LTR driving the neomycin resistance gene and the tRNA^{Va1} RNA pol III promoter driving expression of the ribozyme.

### Example 5

### In Vitro Cleavage Assays

[0099] Hairpin or hammerhead ribozymes are tested for cleavage activity in an in vitro assay. Ribozyme and substrate synthesis is achieved by a new method of plasmid-independent in vitro transcription (Welch et al 1997). Briefly, oligonucleotides are synthesized (Retrogen, San Diego CA) with the T7 RNA polymerase promoter sequence contiguous with the ribozyme or substrate sequences, to allow for in vitro transcription of annealed oligonucleotides without the need for plasmid cloning. In vitro cleavage is tested in two hour time course reactions in 40 mM Tris pH 7.5, 10 mM MgC₂, 2 mM spermidine, at 37° C. (Welch et al 1997). Reaction products are analyzed by polyacrylamide gel electrophoresis (PAGE) and quantified by phosphorimager analysis (Molecular Dynamics). The Michaelis constant (Kₘ^{app}) and k₂ are determined for each ribozyme by performing single turnover kinetic experiments with ribozyme concentrations of 2-4 nM and substrate concentrations ranging from 2-200 nM, with analysis as above. The Kₘ^{app} and k₂ for the ribozymes is estimated for a Hanes plot with R2>0.90. Catalytic efficiency is calculated as k₂/Kₘ^{app}. In vitro cleavage data for several representative ribozymes targeting specific sites in the CDK4, CDK2, CDC2, cyclin B1, and MMP-1 genes is shown in Table 19.

TABLE 19
Summary of kinetics data for additional hairpin (HP) and
hammerhead (HH) ribozyme candidates.

| | HH k₂/Kₘ^{app} | HP k₂/Kₘ^{app} |
|---|---|---|
| CDK4 | | |
| cdk4-4 8.9 | 8.33 | |
| cdk4-4,8g6 | | 7.3 |
| cdk4-1 7.9 | 6.61 | |
| CDC2 | | |
| cdc2-6/7,8 g7h | 14.4 pig, | |
| | 31.9 human | |
| cdc2-6,8g7h | | 6.25 |
| CDK2 | | |
| CDK2-4/7,9 | 27.37 | |
| CDK2-4,7 | | 10.76 |
| CYCB1 | | |
| CycB 8,8 | 9.7 | |
| MMP-1 | | |

| | |
|---|---|
| ColR3-9,8 | 0.46 pig, |
| | 0.24 human |
| ColR9-7,9 | 4615.00 |
| ColR1086-9,8 | 52.5 |

### Example 6

### In Vivo Use of Ribozymes

A. Experimental Protocols

[0100] All animals are treated according to the guidelines of the Public Health Service Policy on Humane Care and Use of Laboratory Animals.

1. Porcine Scar Model

[0101] Domestic pigs of approximately 35 kg are acclimatized for 14 days to the laboratory environment. Cutaneous lesions are created surgically in five places on the flanks of each pig. Each lesion is 3 cm long×5 mm deep, with a 2 mm slice removed from each lesion site. The wound edges may be sealed by electrocautery. Alternatively, lesions can be created utilizing a 6 mm punch biopsy.

[0102] The wound is treated daily by dermal application to each lesion of the desired test substance (with at least 2 untreated control sites per pig). Sites may be bandaged at the direction of the attending veterinarian. All sites are treated identically. Pigs wear protective ‘jackets’ to prevent mechanical irritation of the lesion sites.

[0103] The healing process is scored subjectively on a daily basis (1=fresh lesion, 5=fully healed), and the study terminated when control (untreated) sites score as fully healed.

2. Rabbit Disease Model

[0104] Dutch belted rabbits of approximately 2 kg are acclimatized for about 14 days in the laboratory environment. 0.06 Units of dispase is injected intravitreally in order to induce disease. Proliferative vitreoretinopathy (PVR) is then scored on days 1, 7, 14, 28 and 48 (1=0, 5=retinal detachment). Typical digital pictures of the process are taken by fundoscopy.

[0105] The rabbits are treated on day 21 by injection of either ribozyme or control. The study is terminated when the control (vehicle) sites score as fully detached. Treatment group may be continued if detachment not evident.

B. In Vivo Results

[0106] An example of the use of the PCNA targeted ribozymes in the porcine scar model is shown in FIG. 7. Panel A shows the effect of vehicle control on two 6 mm punch biopsies after 14 days. Panel B shows the effect of ribozyme treatment on two 6 mm punch biopsies after 14 days. The wound is healed in the treated sample and the extent of scarring is diminished in this example.

[0107] An example of the use of the PCNA targeted ribozymes formulated in DOTAP:cholesterol in the rabbit dispase model is shown in FIGS. 8A-8C. Panel A shows the normal eye. Panel B shows the effect of dispase followed by treatment with vehicle after 31 days. Panel C shows the effect of dispase followed by treatment with ribozyme after 31 days. The retina is complete detached in the vehicle treated eye. The extent of proliferative vitreoretinopathy is diminished and no retinal detachment is evident in the ribozyme treated eye.

[0108] From the foregoing, it will be appreciated that, although specific embodiments of the invention have been described herein for purposes of illustration, various modifications may be made without deviating from the spirit and scope of the invention. Accordingly, the invention is not limited except as by the appended claims.

### Example 7

### In Vitro Percutaneous Absorption of [³²P]-Ribozyme in Human Cadaver Skin

[0109] The example was to evaluate the in vitro percutaneous absorption of eight test formulations of ³²P-labeled ribozyme (PN30006) in tape-stripped and intact human cadaver skin. Cumulative transdermal absorption of radiolabeled drug was measured at 1 and 24 hours. Tissue compartment (stratum comeum, epidermis, dermis) recovery was measured at 24 hours.

[0110] Experimental Design:

| | | | | Reservoir | Tissue |
|---|---|---|---|---|---|
| Group # | | Formulation | Ribozyme | Samples | Recovery |
| (n = 6) | Skin | Lot # | (% w/w) | (Hrs) | (Hrs) |
| 1 | stripped | 360-34A | 0.5% | 1, 24 | 24 |
| 2 | stripped | 360-34B | 0.5% | 1, 24 | 24 |
| 3 | stripped | 360-34C | 0.5% | 1, 24 | 24 |
| 4 | stripped | 360-34D | 0.5% | 1, 24 | 24 |
| 5 | stripped | 360-35E | 0.5% | 1, 24 | 24 |
| 6 | stripped | 360-35F | 0.5% | 1, 24 | 24 |
| 7 | stripped | 360-35G | 0.5% | 1, 24 | 24 |
| 8 | stripped | 360-35H | 0.5% | 1, 24 | 24 |
| 9 | Intact | 360-35G | 0.5% | 1, 24 | 24 |

Materials

[0111] Ribozyme Formulations

| | |
|---|---|
| 360-34A | 5 mg/ml ribozyme in 10 mM DTT, 1.5% HEC |
| 360-34B | 5 mg/ml ribozyme in 0.1% SDS, 1.5% HEC |
| 360-34C | 5 mg/ml ribozyme in 5% DMSO, 1.5% HEC |
| 360-34D | 5 mg/ml ribozyme in 15% PG, 1.5% HEC |
| 360-35E | 5 mg/ml ribozyme in 10 mM DTT, 0.1% SDS, 1.5% HEC |
| 360-35F | 5 mg/ml ribozyme in 5% DMSO, 15% PG, 1.5% HEC |
| 360-35G | 5 mg/ml ribozyme in 10 mM DTT, 0.1% SDS, 5% DMSO, |
| | 1.5% HEC |
| 360-35H | 5 mg/ml ribozyme in 10 mM DTT, 5% DMSO, 15% PG, |
| | 1.5% HEC |

[0112] Key to Abbreviations:
[0113] DTT Dithiotheitol (reducing agent)
[0114] HEC Hydroxyethylcellulose (gelling agent)
[0115] SDS Sodium docedyl sulfate (penetration enhancer)
[0116] DMSO Dimethyl sulfoxide (penetration enhancer)
[0117] PG Propylene glycol (penetration enhancer)

[0118] Human Skin:

[0119] Human cadaver skin was obtained from a single donor. The skin was dermatomed to approximately 200 micron thickness. Skin was excluded if it was damaged, had irregularities (scar tissue, holes, birthmarks, etc.) or was from donors with infectious disease. Skin samples were frozen until use. Skin specimens were thawed overnight in the refrigerator in plastic sealed bags prior to the experiment.

Spiking Test Formulations:

[0120] Test formulations were spiked with [³²P]-ribozyme prior to the experiment. 15 íl of the radiolabeled solution was added to 1.0 gram (ml) of the formulation and spatulated.

[0121] To assay the final specific activity of the spiked test formulation, approximately 10-30 mg of the formulation was weighed (n=3), 100 μl samples were placed in 10 ml of Ecoscint® scintillation fluor (National Diagnostics #LS275) and counted in a Beckman Model LS 3801 liquid scintillation counter with a pre-calibrated quench curve for ³²P. Thirty (30) mg of spiked formulation was applied to each chamber. The total DPM of the applied dose was calculated by determining the total DPM applied in the 30 mg dose and subtracting the DPM of the application tips.

Equipment:

[0122] A total of 54 Franz static diffusion glass diffusion chambers (Crown Glass Cat #FDC-100) with a magnetic stirrer mounted on a 9-position Franz diffusion cell drive console with acrylic blocks, magnetic stirrers, and stainless steel manifolds (Crown #FDCD-9-LV) was used for the study. The reservoir volume (6-11 ml) of each cell was pre-calibrated.

Equipment Set-Up:

[0123] The diffusion cells were filled with 4% bovine serum album (BSA, Fraction V) (Sigma Cat. #A2153) in isotonic buffered (pH 7.04) saline (PBS Fisher Cat #C5551-20 Celline II isotonic saline solution) with care to avoid bubbles at the skin interface. The diffusion cells were equilibrated for 1-2 hours to a temperature of 37° C. by a circulating water pump (Haake) prior to applying skin specimens.

Application of Drug to Skin:

[0124] The intact or prior tape-stripped dermatomed human cadaver skin was placed on the chamber and sealed with an O-ring. The skin surface area exposed to the test formulations was 1.77 cm². The skin was equilibrated for 30 minutes at 37° C. on the diffusion cell prior to applying test formulation. A total of 30 mg of the spiked formulation was applied to the skin surface using a Gilson Microman® positive displacement pipette and gently rubbed into the skin using the pipette tip. The dispensing tips were retained and counted. The mean DPM retained by the dispensing tips was calculated and subtracted from the theoretical DPM to determine the mean total DPM applied to each chamber.

Sample Collection:

[0125] Reservoir:

[0126] At 1 and 24 hours a 1.0 ml sample was removed from the reservoir using a calibrated Gilson P1000 Pipetteman® micropipette, and the volume replaced with 1.0 ml BSA-saline solution. The samples were placed in a scintillation vial containing Ecoscint® scintillation fluor (National Diagnostics #LS-275) and equilibrated overnight in the dark before counting.

[0127] Washes and Gauze Wipes:

[0128] At 24 hours the skin surface was washed three times with 1.0 ml 2% Oleth-20 (Croda, Inc. #9004-98-2) in water, followed by 2 washes with 1.0 ml of 5% Span 80 in isopropanol. The wash solutions were collected for recovery counts. The dispensing tips used for the washing procedure were also counted and included in the “wash” compartment. After washing, the skin surface was wiped with 3 sequential cotton gauze cloths, which were saved for recovery counts in the “Gauze” compartment.

[0129] Tape Stripping (Stratum Corneum):

[0130] The skin specimens were either tape-stripped prior to drug application or following the gauze wiping. The skin was placed dermis side down onto a flat surface. The stratum corneum was removed by tape-stripping the skin with cellophane tape until “glistening” (approximately 22 strips) or until epidermal separation started to occur. The first two strips that remove the excess drug adhering to the outer surface of the stratum corneum were counted separately. These counts were included in total recovery (SC Surface) but excluded from stratum corneum compartment recovery. Four groups each consisting of five consecutive tape strips were placed in a scintillation vial containing Scintilene® (Fisher #SX2-4).

[0131] Epidermis and Dermis:

[0132] After tape-stripping the intact skin or after removing the tape-stripped skin from the chamber, the dermis and epidermis were separated by microwave technique (2-5 sec.). The separated epidermis was placed in a vial containing 1 ml of Soluene 350 (Packard, Inc #6003038), and dermis in vial containing 2 ml Soluene 350. The tissues were then digested in a 60° C. oven for 4 hours. Hionic-Fluor (Packard, Inc #6013319) was added to the digested tissues, counted in a Beckman LSC and corrected for quenching.

Recovery:

[0133] The percent of ³²P-ribozyme recovered in the reservoir, washes, gauze wipes, and skin compartments (stratum corneum, epidermis, dermis) was determined by calculating the percent of the total applied DPM recovered in the respective compartments.

[0134] The total micrograms of drug recovered in each compartment was obtained by multiplying the % recovery by the total amount (micrograms) of drug applied to each chamber.

Data Entry/Calculations:

[0135] The DPM data from the LSC tapes, measurements for cell volume, and quantity of drug applied were entered into a standardized Quattro Pro spreadsheet. The data were calculated after discarding outlier values for each compartment. A value was considered to be an “outlier” if the questionable value differed from the re-calculated average by more than four times the average deviation of the remaining values (Skoog & West, Analytical Chemistry).

Results

[0136] The total DPM applied to each cell ranged from 12-15×10⁶. The cumulative transdermal absorption of ³²P-ribozyme is presented as the percent of the applied dose recovered in the reservoir at each time point (FIG. 9). The transdermal absorption of ³²P-ribozyme is also presented as total micrograms recovered in the reservoir (FIG. 10). The total 24 hr flux in the tape-stripped skin ranged from 5-12% compared to 0.2% in the intact skin.

[0137] The localization of ³²P-ribozyme in the various skin compartments is presented as both percent of the applied dose (DPM) recovered in each compartment (FIG. 11) and total micrograms in each compartment (FIG. 12). The recovery of the formulations in the dermal tissues was similar in the tape-stripped skin, ranging from 0.5-1.0% of the applied dose compared to 0.1% in the intact skin. The recovery of all formulations was high in the epidermis in the tape-stripped skin ranging from 3-10% compared to 0.2% in the intact skin.

[0138] Tables 20 and 21 rank the absorption (%, íg) of the test formulations for the sum of the recoveries in the reservoir, epidermis and dermis.

TABLE 20
Overall effectiveness (percent)

| | | | | | SUM |
|---|---|---|---|---|---|
| Relative | | | | | (Reservior, |
| Effective- | | Formulation | Ribozyme | Descrip- | Epi. Dermis) |
| ness | Skin | Lot # | (% w/w) | tion | % |
| 1 | stripped | 360-34A | 0.5 | Cream | 23.1 |
| 2 | stripped | 360-34B | 0.5 | Cream | 20.1 |
| 3 | stripped | 360-34C | 0.5 | Cream | 20.0 |
| 4 | stripped | 360-34D | 0.5 | Cream | 17.0 |
| 5 | stripped | 360-35E | 0.5 | Cream | 16.2 |
| 6 | stripped | 360-35F | 0.5 | Cream | 15.7 |
| 7 | stripped | 360-35G | 0.5 | Cream | 14.6 |
| 8 | stripped | 360-35H | 0.5 | Cream | 11.7 |
| 9 | Intact | 360-35G | 0.5 | Cream | 0.5 |

[0139] TABLE 21
Overall effectiveness (micrograms)

| | | | | | SUM |
|---|---|---|---|---|---|
| Relative | | | | | (Reservior, |
| Effective- | | Formulation | Ribozyme | Descrip- | Epi. Dermis) |
| ness | Skin | Lot # | (% w/w) | tion | % |
| 1 | stripped | 360-34A | 0.5 | Cream | 34.7 |
| 2 | stripped | 360-34B | 0.5 | Cream | 30.1 |
| 3 | stripped | 360-34C | 0.5 | Cream | 29.9 |
| 4 | stripped | 360-34D | 0.5 | Cream | 25.5 |
| 5 | stripped | 360-35E | 0.5 | Cream | 24.3 |
| 6 | stripped | 360-35F | 0.5 | Cream | 23.6 |
| 7 | stripped | 360-35G | 0.5 | Cream | 21.8 |
| 8 | stripped | 360-35H | 0.5 | Cream | 17.5 |
| 9 | Intact | 360-35G | 0.5 | Cream | 0.8 |

### Exmaple 8

### Inhibition of Experimental PVR by Ribozymes Targeting Rabbit PCNA

A. Experimental PVR treated with Ribozyme:Lipid Complex

Experimental Design

[0140] The rabbit model involves the injection of dispase into the vitreal space without the need to introduce retinal tears. Prior models have relied on exogenous cells such as fibroblasts to induce disease. In the dispase model, no assumptions are made as to the type of endogenous cells involved in the formation of disease. The severity of PVR correlated with the dose of dispase injected. The optimal dose of dispase has been determined to minimize interfering complications such as cataract and hemorrhage. This model uses intravitreal rather than subretinal injection. The timing and complexity of the cellular response correspond to the human disease. These advantages make this model particularly attractive. The single disadvantage of relatively long timeframe is easily overcome by extending the period of observation. This model was used to test the efficacy of the chimeric PCNA targeted ribozyme.

[0141] A selected lot of dispase was tested in the rabbit eye to titrate the dose and time frame for disease development and aliquots frozen for all remaining experiments (Frenzel E M, Neely K A, Walsh A W, Cameron J D, Gregerson D S. 1998. A new model of proliferative vitreoretinopathy. IOVS 39:2157-2164). Twelve 1-2 Kg Dutch Belted rabbits received a single intravitreal injection of 0.06, 0.07, or 0.08 U dispase (Boehringer Mannheim, Indianapolis, Ind.) on day 0 (four rabbits each dose). Rabbits were anesthetized with ketamine/xylazine, their eyes dilated with 2.5% phenylephrine and 1% tropicamide, and a local anesthetic, proparacain HCI applied. 0.1 cc of dispase was injected into the right eye of each rabbit with a 30 gauge needle, delivering the dispase into the vitreous cavity directly in front of the retina without traumatizating the retina, under direct visualization with a dissecting microscope equipped with floating Charles' lens. Left eyes serve as controls. Rabbits were followed for progression of disease by fundoscopy at days 1, 7, 14, 21, 28, and 48. A generous timeframe was allocated to maximize the probability of disease development in the dispase treated groups. Fundoscopic evaluation was by two independent, trained observers for this and the following experiments. In this experiment, a dose of 0.07 U dispase resulted in uniform PVR development by 21 days.

[0142] Following the same protocol, a second experiment was performed with eight rabbits given 0.07 U dispase in the right eye on day 0. At 7-14 days post-injection, all eyes had vitreous and pre-retinal hemorrhage. At 21 days 7 of 8 rabbits had early PVR characterized by fibroglial proliferation. Before a retinal detachment was noted in any eyes, the control group of rabbits (n=4) was treated with an intravitreal injection of 0.1 cc DOTAP:cholesterol vehicle. The experimental group (n=4) was given an intravitreal injection of 0.1 cc chimeric PCNA targeted ribozyme (PN30006).

Fundoscopic Analysis

[0143] Fundoscopic evaluation of chimeric PCNA targeted ribozyme versus control treated rabbit eyes is the same as shown in FIGS. 8A-8C. By day 35, all rabbits in the control group developed significant retinal detachment. Three of four in the chimeric PCNA targeted ribozyme treated group did not develop a retinal detachment, while one developed a small local detachment, which did not progress over the 60 day follow-up period. These data suggest that inhibiting proliferation of cells causative of PVR with chimeric ribozyme to PCNA may have a therapeutic or preventative role.

[0144] All eyes were scored by two independent trained observers on a scale of 1-6 as per Table 22 (Fastenberg et al. 1982. A comparison of different cellular inocula in an experimental model of massive periretinal proliferation. Am J Ophthalmol. 93:559-56; Sakamoto et al. 1995. Inhibition of experimental proliferative vitreoretinopathy by retroviral vector-mediated transfer of suicide gene. Ophthalmology 102:1417-1424). The scale is based on inflammation, hemorrhage, distortion, intravitreal haze and membranes, and formation of retinal breaks, traction, and detachments. The results (FIG. 13) indicate that the chimeric ribozyme is effective in preventing or retarding the development of PVR.

TABLE 22
Histopathologic scoring of PVR

| Score | Histopathologic Evaluation |
|---|---|
| 0 | Normal eye |
| 1 | Hemorrhage/preretinal |
| | gliotic changes |
| 2 | Focal Retration |
| 3 | Extensive PVR with focal |
| | traction |
| 4 | PVR with focal retinal |
| | detachments of medullary |
| | ray |
| 5 | Extensive peripapillary |
| | retinal detachments |
| 6 | Total retinal detachments |

Histopathologic Analysis

[0145] Treated and control eyes were enucleated, fixed in 4% paraformaldehyde, embedded in paraffin, and sectioned for histopathologic evaluation. Selected gross specimens were photographed before sectioning. Histologic examination was performed after hematoxylin and eosin staining. Histopathologic analyses correlated with the gross pathological findings and confirmed the clinical diagnoses of PVR and retinal detachment.

[0146] The ability of this chimeric ribozyme complex to prevent or lessen the degree of damage due to aberrant proliferation of cells in the eye could be a significant advancement in the treatment of PVR. This type of therapy may be especially well suited for use in patients facing vision loss due to the failure of traditional surgical treatment (McCormack P, Simcock P R, Charteris D, Lavin M J. 1994. Is surgery for proliferative vitreoretinopathy justifiable? Eye 8:75-76.).

B. Experimental PVR Treated with Ribozyme Alone

[0147] Three additional experiments in the PVR model were carried out. Experiment 2 was a repeat of the first experiment described above (i.e., Example 8, Section A) with the addition of a control group with scrambled sequence (random specificity) ribozyme complexed to the lipid. The other two experiments were done using the ribozyme alone at 10 mg/ml without the addition of the DOTAP:cholesterol lipid. These were done due to an observed precipitate that took greater than 2 weeks to clear. The precipitate was not observed when lipid was absent. Experiment 3 repeated the timing of the first two experiments, with ribozyme treatment on day 20. Experiment 4 was performed with treatment on day 7 to represent a prophylactic approach. The overall severity of the PVR has decreased over time even in the control group consistent with loss of activity of the dispase. The results are shown in table 23 where two independent assessments were made by trained observers using a modified Fastenberg et al. (1982) scoring system (i e., Table 22).

TABLE 23
Scoring of ribozyme and control treated rabbit eyes
with Dispase induced PVR.

| | | | | | Treat- | Assess- | |
|---|---|---|---|---|---|---|---|
| | | | | | ment | ment | Ave. |
| Exp # | | Ribozyme | Lipid | N | Day | Day | Score |
| 2 | Treated | PN30004 | + | 4 | 20 | 35 | 3.1 ± 1.3 |
| | Control | Scrambled | | 4 | | | 5.3 ± 1.2 |
| | | Dextrose | | 4 | | | 4.5 ± 1 |
| 3 | Treated | PN30006 | − | 4 | 20 | 49 | 1.8 ± 1.7 |
| | Control | Dextrose | | 3 | | | 3.7 ± 0.6 |
| | | no injection | | 2 | | | 2.5 ± 0.7 |
| 4 | Treated | PN30006 | − | 6 | 7 | 28 | 0.7 ± 0.8 |
| | Control | Dextrose | | 6 | | | 2.2 ± 0.4 |

[0148] The results show a consistent decrease in severity of PVR following treatment with active chimeric PCNA targeted ribozyme compared to untreated or scrambled ribozyme controls.

### Example 9

### Effects of PCNA Targeted Ribozyme on Scar Formation in the Pig

[0149] A chimeric PCNA targeted ribozyme (PN30006) has been tested in a pig model of scarring due to surgical incision. Briefly, two female commercial pigs underwent surgical creation of wounds followed by administration of the test or vehicle article into selected wounds for three consecutive days. Crescent shaped wound sites (5 on each side), each measuring approximately 3 cm long×5 mm deep×6 mm wide, were made on the back of each animal (FIG. 14A). Each wound was sutured once (FIG. 14B). This type of wound was made to replicate excisional wounding. Wounds were dressed with an Op-site bandage immediately after instillation of the test article on Days 1, 2 and 3. Animals were bandaged and dressed in restraining jackets to prevent mechanical irritation of the surgical sites (as necessary).

[0150] Visual observations made in the in-life phase were scored as follows: 1 completely healed/scarred, 2 scab exfoliating, 3 wound scabbing, 4 open wound. Histopathologic evaluation was done at 36 days, and included scoring for: epithelialization, inflammation, scar tissue, and connective tissue.

[0151] There were no treatment related clinical signs following instillation of the test or vehicle articles into selected wound sites for 3 consecutive days. All clinical signs that were observed (red skin, exudate, scabbing) were considered to be part of the normal healing process for surgical wounds of the type created on this study.

[0152] All wound sites were prepared for histopathological examination by embedding in paraffin wax, sectioning and staining with hematoxylin and eosin/phloxine. Histopathological examination was conducted on all wound sites from both animals to evaluate the following parameters:

| | |
|---|---|
| a. Re-epithelialization | Present, partial, or absent epithelializa- |
| | tion of the surface epithelium. |
| b. Inflammation | Degree of severity, cell type and distri- |
| | bution. |
| c. Scar Tissue Formation | Presence or absence of scar tissue, |
| | extent, size, depth and severity of |
| | scarring. |
| d. Connective Tissue Formation | Presence or absence of collagen and |
| | connective tissue associated with |
| | normal healing, the extent, size and |
| | depth (as opposed to scar tissue |
| | formation). |

[0153] Scarring in comparison to healing was differentiated by the amount of connective tissue, the amount of neovascularity, inflammation, and amount of normal subcutaneous collagen present. In the scarred lesions, there was more connective tissue and the plug area was clearly differentiated from the adjacent normal tissue, while in the more healed or drug treated lesions, the plug area was almost contiguous with the adjacent tissue and difficult to differentiate from the adjacent tissue.

[0154] Histopathological examination failed to detect any negative long term consequences on epithelialization by drug treatment since complete healing occurred at all wound sites. Additionally, there was no correlation between treatment and inflammation. Histopathological examination of wound sites 36 days after wounding revealed that chimeric PCNA targeted ribozyme treated wounds were more completely healed and less scarred than untreated wounds or wounds treated with the vehicle article.

1-105. (canceled)

106. A method of treating a proliferative skin disease or scarring, comprising administering to a patient a therapeutically effective amount of a ribozyme which cleaves RNA encoding a cyclin PCNA, such that said proliferative skin disease or scarring is treated, said RNA comprising SEQ ID NO: 4145, wherein the binding arms of said ribozyme bind to SEQ ID NO:4145.

107. The method of claim 106, wherein said administration is local.

108. The method of claim 106, wherein said scar is a keloid.

109. The method of claim 106, wherein said scar is an adhesion.

110. The method of claim 106, wherein said scar is a hypertrophic scar.

111. The method of claim 106, wherein said scar is a hypertrophic burn scar.

112. The method of claim 106, wherein said scar is caused by trauma.

113. The method of claim 106, wherein said ribozyme is a hammerhead or hairpin ribozyme.

114. The method of claim 106, wherein said ribozyme is formulated within a solution.

115. The method of claim 106 wherein said ribozyme is formulated along with a lipid.

116. The method of claim 115, wherein said lipid is DOTAP: cholesterol.

117. The method of claim 106, wherein said ribozyme is formulated with ribonuclease inhibitors.

118. The method of claim 117, wherein said ribonuclease inhibitor is a reducing agent.

119. The method of claim 118, wherein the reducing agent is dithiothreitol.

120. The method of claim 117, wherein said ribonuclease inhibitor is a detergent.

121. The method of claim 120, wherein the detergent is sodium dodecyl sulfate.

122. The method of claim 117, wherein said ribonuclease inhibitor is vanidyl nucleotides.

123. The method of claim 117, wherein said ribonuclease inhibitor is aurin tricarboxcylic acid.

124. The method of claim 117, wherein said ribonuclease inhibitor is hydrogen peroxide.

125. The method of claim 117, wherein said ribonuclease inhibitor is an RNA decoy.

126. The method according to claim 97 wherein said RNA decoy is a tRNA.

127. The method of claim 106, wherein said ribozyme comprises ribonucleic acids.

128. The method of claim 106, wherein said ribozyme comprises deoxyribonucleic acids and ribonucleic acids.

129. The method of claim 106, wherein said ribozyme comprises nucleic acids having phosphothioate linkages.

130. The method of claim 106, wherein said ribozyme is administered topically.

131. The method of claim 106, wherein said ribozyme is administered intradermally.

132. The method of claim 106, wherein said ribozyme is formulated within a cream, ointment or lotion.

133. The method of claim 106, wherein said ribozyme comprises a sequence selected from the group consisting of SEQ ID NOS: 4383 and 4385.

134. The method of claim 133, wherein said sequence is SEQ ID NO: 4385.

135. The method of claim 106, wherein said proliferative skin disease is psoriasis.

136. The method of claim 106, wherein said proliferative skin disease is dermatitis.

137. The method of claim 106, wherein said proliferative skin disease is keratosis.

138. The method of claim 106, wherein said proliferative skin disease is basal cell carcinoma.

139. The method of claim 106, wherein said proliferative skin disease is viral or seborrheic wart.

The application's sequence listing, which the Patent Office published only in electronic form, follows.

SEQUENCE LISTING (4523 sequences)

SEQ ID NO: 1 - DNA, 19 bp, Homo sapiens
  Cdk1 ribozyme binding site
atggacgatcagggttgcc

SEQ ID NO: 2 - DNA, 19 bp, Homo sapiens
  Cdk1 ribozyme binding site
gatcagggttgccctcggt

SEQ ID NO: 3 - DNA, 19 bp, Homo sapiens
  Cdk1 ribozyme binding site
ggttgccctcggtgtaaga

SEQ ID NO: 4 - DNA, 19 bp, Homo sapiens
  Cdk1 ribozyme binding site
cctcggtgtaagaccacca

SEQ ID NO: 5 - DNA, 19 bp, Homo sapiens
  Cdk1 ribozyme binding site
ccaccaaatatcggaaccc

SEQ ID NO: 6 - DNA, 19 bp, Homo sapiens
  Cdk1 ribozyme binding site
accaaatatcggaacccct

SEQ ID NO: 7 - DNA, 19 bp, Homo sapiens
  Cdk1 ribozyme binding site
ggaacccctccttgaagct

SEQ ID NO: 8 - DNA, 19 bp, Homo sapiens
  Cdk1 ribozyme binding site
acccctccttgaagctgat

SEQ ID NO: 9 - DNA, 19 bp, Homo sapiens
  Cdk1 ribozyme binding site
ggacacactctctgtgaaa

SEQ ID NO: 10 - DNA, 19 bp, Homo sapiens
  Cdk1 ribozyme binding site
acacactctctgtgaaagt

SEQ ID NO: 11 - DNA, 19 bp, Homo sapiens
  Cdk1 ribozyme binding site
tgtgaaagttgtgtagatt

SEQ ID NO: 12 - DNA, 19 bp, Homo sapiens
  Cdk1 ribozyme binding site
aagttgtgtagatttactg

SEQ ID NO: 13 - DNA, 19 bp, Homo sapiens
  Cdk1 ribozyme binding site
tgtgtagatttactgtttg

SEQ ID NO: 14 - DNA, 19 bp, Homo sapiens
  Cdk1 ribozyme binding site
gtgtagatttactgtttgt

SEQ ID NO: 15 - DNA, 19 bp, Homo sapiens
  Cdk1 ribozyme binding site
tgtagatttactgtttgtg

SEQ ID NO: 16 - DNA, 19 bp, Homo sapiens
  Cdk1 ribozyme binding site
atttactgtttgtgagagg

SEQ ID NO: 17 - DNA, 19 bp, Homo sapiens
  Cdk1 ribozyme binding site
tttactgtttgtgagagga

SEQ ID NO: 18 - DNA, 19 bp, Homo sapiens
  Cdk1 ribozyme binding site
gagtgtggtactccactca

SEQ ID NO: 19 - DNA, 19 bp, Homo sapiens
  Cdk1 ribozyme binding site
tgtggtactccactcagaa

SEQ ID NO: 20 - DNA, 19 bp, Homo sapiens
  Cdk1 ribozyme binding site
tactccactcagaaagagc

SEQ ID NO: 21 - DNA, 19 bp, Homo sapiens
  Cdk1 ribozyme binding site
agagcaacttcagggtaca

SEQ ID NO: 22 - DNA, 19 bp, Homo sapiens
  Cdk1 ribozyme binding site
gagcaacttcagggtacaa

SEQ ID NO: 23 - DNA, 19 bp, Homo sapiens
  Cdk1 ribozyme binding site
cttcagggtacaactcttt

SEQ ID NO: 24 - DNA, 19 bp, Homo sapiens
  Cdk1 ribozyme binding site
ggtacaactctttgaagat

SEQ ID NO: 25 - DNA, 19 bp, Homo sapiens
  Cdk1 ribozyme binding site
tacaactctttgaagatcc

SEQ ID NO: 26 - DNA, 19 bp, Homo sapiens
  Cdk1 ribozyme binding site
acaactctttgaagatccc

SEQ ID NO: 27 - DNA, 19 bp, Homo sapiens
  Cdk1 ribozyme binding site
tttgaagatcccactgttg

SEQ ID NO: 28 - DNA, 19 bp, Homo sapiens
  Cdk1 ribozyme binding site
tcccactgttgacaaggag

SEQ ID NO: 29 - DNA, 19 bp, Homo sapiens
  Cdk1 ribozyme binding site
caaggaggttgagatcagg

SEQ ID NO: 30 - DNA, 19 bp, Homo sapiens
  Cdk1 ribozyme binding site
ggttgagatcaggaaaaaa

SEQ ID NO: 31 - DNA, 19 bp, Homo sapiens
  Cdk1 ribozyme binding site
aaaagtgctaaagatatac

SEQ ID NO: 32 - DNA, 19 bp, Homo sapiens
  Cdk1 ribozyme binding site
gctaaagatatacaataaa

SEQ ID NO: 33 - DNA, 19 bp, Homo sapiens
  Cdk1 ribozyme binding site
taaagatatacaataaaag

SEQ ID NO: 34 - DNA, 19 bp, Homo sapiens
  Cdk1 ribozyme binding site
atatacaataaaagggaag

SEQ ID NO: 35 - DNA, 19 bp, Homo sapiens
  Cdk1 ribozyme binding site
gaagaagattttcctagtc

SEQ ID NO: 36 - DNA, 19 bp, Homo sapiens
  Cdk1 ribozyme binding site
aagaagattttcctagtct

SEQ ID NO: 37 - DNA, 19 bp, Homo sapiens
  Cdk1 ribozyme binding site
agaagattttcctagtcta

SEQ ID NO: 38 - DNA, 19 bp, Homo sapiens
  Cdk1 ribozyme binding site
gaagattttcctagtctaa

SEQ ID NO: 39 - DNA, 19 bp, Homo sapiens
  Cdk1 ribozyme binding site
gattttcctagtctaagag

SEQ ID NO: 40 - DNA, 19 bp, Homo sapiens
  Cdk1 ribozyme binding site
tttcctagtctaagagaat

SEQ ID NO: 41 - DNA, 19 bp, Homo sapiens
  Cdk1 ribozyme binding site
tcctagtctaagagaatac

SEQ ID NO: 42 - DNA, 19 bp, Homo sapiens
  Cdk1 ribozyme binding site
taagagaatacaatgattt

SEQ ID NO: 43 - DNA, 19 bp, Homo sapiens
  Cdk1 ribozyme binding site
tacaatgatttcttggaag

SEQ ID NO: 44 - DNA, 19 bp, Homo sapiens
  Cdk1 ribozyme binding site
acaatgatttcttggaaga

SEQ ID NO: 45 - DNA, 19 bp, Homo sapiens
  Cdk1 ribozyme binding site
caatgatttcttggaagaa

SEQ ID NO: 46 - DNA, 19 bp, Homo sapiens
  Cdk1 ribozyme binding site
atgatttcttggaagaagt

SEQ ID NO: 47 - DNA, 19 bp, Homo sapiens
  Cdk1 ribozyme binding site
ggaagaaattgttttcaac

SEQ ID NO: 48 - DNA, 19 bp, Homo sapiens
  Cdk1 ribozyme binding site
agaaattgttttcaacttg

SEQ ID NO: 49 - DNA, 19 bp, Homo sapiens
  Cdk1 ribozyme binding site
gaaattgttttcaacttga

SEQ ID NO: 50 - DNA, 19 bp, Homo sapiens
  Cdk1 ribozyme binding site
aaattgttttcaacttgac

SEQ ID NO: 51 - DNA, 19 bp, Homo sapiens
  Cdk1 ribozyme binding site
aattgttttcaacttgacc

SEQ ID NO: 52 - DNA, 19 bp, Homo sapiens
  Cdk1 ribozyme binding site
ttttcaacttgaccaacaa

SEQ ID NO: 53 - DNA, 19 bp, Homo sapiens
  Cdk1 ribozyme binding site
aatgtggatttggacaaca

SEQ ID NO: 54 - DNA, 19 bp, Homo sapiens
  Cdk1 ribozyme binding site
atgtggatttggacaacac

SEQ ID NO: 55 - DNA, 19 bp, Homo sapiens
  Cdk1 ribozyme binding site
aatggagatataccaaaag

SEQ ID NO: 56 - DNA, 19 bp, Homo sapiens
  Cdk1 ribozyme binding site
tggagatataccaaaagga

SEQ ID NO: 57 - DNA, 19 bp, Homo sapiens
  Cdk1 ribozyme binding site
caaagatgttattcagaaa

SEQ ID NO: 58 - DNA, 19 bp, Homo sapiens
  Cdk1 ribozyme binding site
aaagatgttattcagaaaa

SEQ ID NO: 59 - DNA, 19 bp, Homo sapiens
  Cdk1 ribozyme binding site
agatgttattcagaaaaat

SEQ ID NO: 60 - DNA, 19 bp, Homo sapiens
  Cdk1 ribozyme binding site
gatgttattcagaaaaata

SEQ ID NO: 61 - DNA, 19 bp, Homo sapiens
  Cdk1 ribozyme binding site
cagaaaaataaattaaagc

SEQ ID NO: 62 - DNA, 19 bp, Homo sapiens
  Cdk1 ribozyme binding site
aaaataaattaaagctgac

SEQ ID NO: 63 - DNA, 19 bp, Homo sapiens
  Cdk1 ribozyme binding site
aaataaattaaagctgact

SEQ ID NO: 64 - DNA, 19 bp, Homo sapiens
  Cdk1 ribozyme binding site
aagctgactcgagaacagg

SEQ ID NO: 65 - DNA, 19 bp, Homo sapiens
  Cdk1 ribozyme binding site
gaagaagctttagaagtgg

SEQ ID NO: 66 - DNA, 19 bp, Homo sapiens
  Cdk1 ribozyme binding site
aagaagctttagaagtgga

SEQ ID NO: 67 - DNA, 19 bp, Homo sapiens
  Cdk1 ribozyme binding site
agaagctttagaagtggaa

SEQ ID NO: 68 - DNA, 19 bp, Homo sapiens
  Cdk1 ribozyme binding site
aaagaagattatttataca

SEQ ID NO: 69 - DNA, 19 bp, Homo sapiens
  Cdk1 ribozyme binding site
aagaagattatttatacaa

SEQ ID NO: 70 - DNA, 19 bp, Homo sapiens
  Cdk1 ribozyme binding site
gaagattatttatacaaaa

SEQ ID NO: 71 - DNA, 19 bp, Homo sapiens
  Cdk1 ribozyme binding site
aagattatttatacaaaaa

SEQ ID NO: 72 - DNA, 19 bp, Homo sapiens
  Cdk1 ribozyme binding site
agattatttatacaaaaag

SEQ ID NO: 73 - DNA, 19 bp, Homo sapiens
  Cdk1 ribozyme binding site
attatttatacaaaaagaa

SEQ ID NO: 74 - DNA, 19 bp, Homo sapiens
  Cdk1 ribozyme binding site
gcagcagattctaaaaagg

SEQ ID NO: 75 - DNA, 19 bp, Homo sapiens
  Cdk1 ribozyme binding site
cagcagattctaaaaagga

SEQ ID NO: 76 - DNA, 19 bp, Homo sapiens
  Cdk1 ribozyme binding site
gcagattctaaaaaggaag

SEQ ID NO: 77 - DNA, 19 bp, Homo sapiens
  Cdk1 ribozyme binding site
aggaagaataagcaggctt

SEQ ID NO: 78 - DNA, 19 bp, Homo sapiens
  Cdk1 ribozyme binding site
aagcaggcttttttagatg

SEQ ID NO: 79 - DNA, 19 bp, Homo sapiens
  Cdk1 ribozyme binding site
agcaggcttttttagatga

SEQ ID NO: 80 - DNA, 19 bp, Homo sapiens
  Cdk1 ribozyme binding site
gcaggcttttttagatgag

SEQ ID NO: 81 - DNA, 19 bp, Homo sapiens
  Cdk1 ribozyme binding site
caggcttttttagatgagc

SEQ ID NO: 82 - DNA, 19 bp, Homo sapiens
  Cdk1 ribozyme binding site
aggcttttttagatgagct

SEQ ID NO: 83 - DNA, 19 bp, Homo sapiens
  Cdk1 ribozyme binding site
ggcttttttagatgagctg

SEQ ID NO: 84 - DNA, 19 bp, Homo sapiens
  Cdk1 ribozyme binding site
ctggagagttctgatctcc

SEQ ID NO: 85 - DNA, 19 bp, Homo sapiens
  Cdk1 ribozyme binding site
tggagagttctgatctccc

SEQ ID NO: 86 - DNA, 19 bp, Homo sapiens
  Cdk1 ribozyme binding site
agttctgatctccctgttg

SEQ ID NO: 87 - DNA, 19 bp, Homo sapiens
  Cdk1 ribozyme binding site
ttctgatctccctgttgct

SEQ ID NO: 88 - DNA, 19 bp, Homo sapiens
  Cdk1 ribozyme binding site
tctccctgttgctctgctt

SEQ ID NO: 89 - DNA, 19 bp, Homo sapiens
  Cdk1 ribozyme binding site
cctgttgctctgcttttgg

SEQ ID NO: 90 - DNA, 19 bp, Homo sapiens
  Cdk1 ribozyme binding site
tgctctgcttttggctcag

SEQ ID NO: 91 - DNA, 19 bp, Homo sapiens
  Cdk1 ribozyme binding site
gctctgcttttggctcagc

SEQ ID NO: 92 - DNA, 19 bp, Homo sapiens
  Cdk1 ribozyme binding site
ctctgcttttggctcagca

SEQ ID NO: 93 - DNA, 19 bp, Homo sapiens
  Cdk1 ribozyme binding site
cttttggctcagcataaag

SEQ ID NO: 94 - DNA, 19 bp, Homo sapiens
  Cdk1 ribozyme binding site
gctcagcataaagatagat

SEQ ID NO: 95 - DNA, 19 bp, Homo sapiens
  Cdk1 ribozyme binding site
cataaagatagatctaccc

SEQ ID NO: 96 - DNA, 19 bp, Homo sapiens
  Cdk1 ribozyme binding site
aagatagatctacccaatt

SEQ ID NO: 97 - DNA, 19 bp, Homo sapiens
  Cdk1 ribozyme binding site
gatagatctacccaattag

SEQ ID NO: 98 - DNA, 19 bp, Homo sapiens
  Cdk1 ribozyme binding site
ctacccaattagaaatgca

SEQ ID NO: 99 - DNA, 19 bp, Homo sapiens
  Cdk1 ribozyme binding site
tacccaattagaaatgcaa

SEQ ID NO: 100 - DNA, 19 bp, Homo sapiens
  Cdk1 ribozyme binding site
aatgcaacttgagaaaccc

SEQ ID NO: 101 - DNA, 19 bp, Homo sapiens
  Cdk1 ribozyme binding site
caaacctgtaaaaccagtg

SEQ ID NO: 102 - DNA, 19 bp, Homo sapiens
  Cdk1 ribozyme binding site
cagtgacgttttccacagg

SEQ ID NO: 103 - DNA, 19 bp, Homo sapiens
  Cdk1 ribozyme binding site
agtgacgttttccacaggc

SEQ ID NO: 104 - DNA, 19 bp, Homo sapiens
  Cdk1 ribozyme binding site
gtgacgttttccacaggca

SEQ ID NO: 105 - DNA, 19 bp, Homo sapiens
  Cdk1 ribozyme binding site
tgacgttttccacaggcat

SEQ ID NO: 106 - DNA, 19 bp, Homo sapiens
  Cdk1 ribozyme binding site
cacaggcatcaaaatgggt

SEQ ID NO: 107 - DNA, 19 bp, Homo sapiens
  Cdk1 ribozyme binding site
aaaatgggtcaacatattt

SEQ ID NO: 108 - DNA, 19 bp, Homo sapiens
  Cdk1 ribozyme binding site
ggtcaacatatttcactgg

SEQ ID NO: 109 - DNA, 19 bp, Homo sapiens
  Cdk1 ribozyme binding site
tcaacatatttcactggca

SEQ ID NO: 110 - DNA, 19 bp, Homo sapiens
  Cdk1 ribozyme binding site
caacatatttcactggcac

SEQ ID NO: 111 - DNA, 19 bp, Homo sapiens
  Cdk1 ribozyme binding site
aacatatttcactggcacc

SEQ ID NO: 112 - DNA, 19 bp, Homo sapiens
  Cdk1 ribozyme binding site
ctggcacctattcacaagc

SEQ ID NO: 113 - DNA, 19 bp, Homo sapiens
  Cdk1 ribozyme binding site
ggcacctattcacaagctt

SEQ ID NO: 114 - DNA, 19 bp, Homo sapiens
  Cdk1 ribozyme binding site
gcacctattcacaagcttg

SEQ ID NO: 115 - DNA, 19 bp, Homo sapiens
  Cdk1 ribozyme binding site
tcacaagcttgaagaagct

SEQ ID NO: 116 - DNA, 19 bp, Homo sapiens
  Cdk1 ribozyme binding site
gaagaagctctgtatgaat

SEQ ID NO: 117 - DNA, 19 bp, Homo sapiens
  Cdk1 ribozyme binding site
aagctctgtatgaatacca

SEQ ID NO: 118 - DNA, 19 bp, Homo sapiens
  Cdk1 ribozyme binding site
tgtatgaataccagccact

SEQ ID NO: 119 - DNA, 19 bp, Homo sapiens
  Cdk1 ribozyme binding site
actgcagatagagacatat

SEQ ID NO: 120 - DNA, 19 bp, Homo sapiens
  Cdk1 ribozyme binding site
tagagacatatggaccaca

SEQ ID NO: 121 - DNA, 19 bp, Homo sapiens
  Cdk1 ribozyme binding site
accacatgttcctgagctt

SEQ ID NO: 122 - DNA, 19 bp, Homo sapiens
  Cdk1 ribozyme binding site
ccacatgttcctgagcttg

SEQ ID NO: 123 - DNA, 19 bp, Homo sapiens
  Cdk1 ribozyme binding site
tcctgagcttgagatgcta

SEQ ID NO: 124 - DNA, 19 bp, Homo sapiens
  Cdk1 ribozyme binding site
tgagatgctaggaagactt

SEQ ID NO: 125 - DNA, 19 bp, Homo sapiens
  Cdk1 ribozyme binding site
aggaagacttgggtattta

SEQ ID NO: 126 - DNA, 19 bp, Homo sapiens
  Cdk1 ribozyme binding site
gacttgggtatttaaacca

SEQ ID NO: 127 - DNA, 19 bp, Homo sapiens
  Cdk1 ribozyme binding site
cttgggtatttaaaccatg

SEQ ID NO: 128 - DNA, 19 bp, Homo sapiens
  Cdk1 ribozyme binding site
ttgggtatttaaaccatgt

SEQ ID NO: 129 - DNA, 19 bp, Homo sapiens
  Cdk1 ribozyme binding site
tgggtatttaaaccatgtc

SEQ ID NO: 130 - DNA, 19 bp, Homo sapiens
  Cdk1 ribozyme binding site
aaaccatgtcagagctgcc

SEQ ID NO: 131 - DNA, 19 bp, Homo sapiens
  Cdk1 ribozyme binding site
gagctgcctcaccacagga

SEQ ID NO: 132 - DNA, 19 bp, Homo sapiens
  Cdk1 ribozyme binding site
acaggaccttgctggaggc

SEQ ID NO: 133 - DNA, 19 bp, Homo sapiens
  Cdk1 ribozyme binding site
ctggaggctatacttcttc

SEQ ID NO: 134 - DNA, 19 bp, Homo sapiens
  Cdk1 ribozyme binding site
ggaggctatacttcttctc

SEQ ID NO: 135 - DNA, 19 bp, Homo sapiens
  Cdk1 ribozyme binding site
ggctatacttcttctcttg

SEQ ID NO: 136 - DNA, 19 bp, Homo sapiens
  Cdk1 ribozyme binding site
gctatacttcttctcttgc

SEQ ID NO: 137 - DNA, 19 bp, Homo sapiens
  Cdk1 ribozyme binding site
tatacttcttctcttgctt

SEQ ID NO: 138 - DNA, 19 bp, Homo sapiens
  Cdk1 ribozyme binding site
atacttcttctcttgcttg

SEQ ID NO: 139 - DNA, 19 bp, Homo sapiens
  Cdk1 ribozyme binding site
acttcttctcttgcttgtc

SEQ ID NO: 140 - DNA, 19 bp, Homo sapiens
  Cdk1 ribozyme binding site
ttcttctcttgcttgtcac

SEQ ID NO: 141 - DNA, 19 bp, Homo sapiens
  Cdk1 ribozyme binding site
tctcttgcttgtcacagag

SEQ ID NO: 142 - DNA, 19 bp, Homo sapiens
  Cdk1 ribozyme binding site
cttgcttgtcacagagcac

SEQ ID NO: 143 - DNA, 19 bp, Homo sapiens
  Cdk1 ribozyme binding site
cagagcactacaggatgca

SEQ ID NO: 144 - DNA, 19 bp, Homo sapiens
  Cdk1 ribozyme binding site
aggatgcattcagtgggct

SEQ ID NO: 145 - DNA, 19 bp, Homo sapiens
  Cdk1 ribozyme binding site
ggatgcattcagtgggctt

SEQ ID NO: 146 - DNA, 19 bp, Homo sapiens
  Cdk1 ribozyme binding site
cagtgggcttttctggcag

SEQ ID NO: 147 - DNA, 19 bp, Homo sapiens
  Cdk1 ribozyme binding site
agtgggcttttctggcagc

SEQ ID NO: 148 - DNA, 19 bp, Homo sapiens
  Cdk1 ribozyme binding site
gtgggcttttctggcagcc

SEQ ID NO: 149 - DNA, 19 bp, Homo sapiens
  Cdk1 ribozyme binding site
tgggcttttctggcagccc

SEQ ID NO: 150 - DNA, 19 bp, Homo sapiens
  Cdk2 ribozyme binding site
tggagaacttccaaaaggt

SEQ ID NO: 151 - DNA, 19 bp, Homo sapiens
  Cdk2 ribozyme binding site
ggagaacttccaaaaggtg

SEQ ID NO: 152 - DNA, 19 bp, Homo sapiens
  Cdk2 ribozyme binding site
ggaaaagatcggagagggc

SEQ ID NO: 153 - DNA, 19 bp, Homo sapiens
  Cdk2 ribozyme binding site
agggcacgtacggcgttgt

SEQ ID NO: 154 - DNA, 19 bp, Homo sapiens
  Cdk2 ribozyme binding site
gtacggagttgtgtacaaa

SEQ ID NO: 155 - DNA, 19 bp, Homo sapiens
  Cdk2 ribozyme binding site
gagttgtgtacaaagccag

SEQ ID NO: 156 - DNA, 19 bp, Homo sapiens
  Cdk2 ribozyme binding site
gaaacaagttgacgggaga

SEQ ID NO: 157 - DNA, 19 bp, Homo sapiens
  Cdk2 ribozyme binding site
ggtggcgcttaagaaaatc

SEQ ID NO: 158 - DNA, 19 bp, Homo sapiens
  Cdk2 ribozyme binding site
gtggcgcttaagaaaatcc

SEQ ID NO: 159 - DNA, 19 bp, Homo sapiens
  Cdk2 ribozyme binding site
taagaaaatccgtggacac

SEQ ID NO: 160 - DNA, 19 bp, Homo sapiens
  Cdk2 ribozyme binding site
gtgcccagtactgccatcc

SEQ ID NO: 161 - DNA, 19 bp, Homo sapiens
  Cdk2 ribozyme binding site
tactgccatccgagagatc

SEQ ID NO: 162 - DNA, 19 bp, Homo sapiens
  Cdk2 ribozyme binding site
ccgagagatctctctgctt

SEQ ID NO: 163 - DNA, 19 bp, Homo sapiens
  Cdk2 ribozyme binding site
gagagatctctctgcttaa

SEQ ID NO: 164 - DNA, 19 bp, Homo sapiens
  Cdk2 ribozyme binding site
gagatctctctgcttaagg

SEQ ID NO: 165 - DNA, 19 bp, Homo sapiens
  Cdk2 ribozyme binding site
ctctctgcttaaggagctt

SEQ ID NO: 166 - DNA, 19 bp, Homo sapiens
  Cdk2 ribozyme binding site
tctctgcttaaggagctta

SEQ ID NO: 167 - DNA, 19 bp, Homo sapiens
  Cdk2 ribozyme binding site
taaggagcttaaccatcct

SEQ ID NO: 168 - DNA, 19 bp, Homo sapiens
  Cdk2 ribozyme binding site
aaggagcttaaccatccta

SEQ ID NO: 169 - DNA, 19 bp, Homo sapiens
  Cdk2 ribozyme binding site
cttaaccatcctaatattg

SEQ ID NO: 170 - DNA, 19 bp, Homo sapiens
  Cdk2 ribozyme binding site
aaccatcctaatattgtca

SEQ ID NO: 171 - DNA, 19 bp, Homo sapiens
  Cdk2 ribozyme binding site
catcctaatattgtcaagc

SEQ ID NO: 172 - DNA, 19 bp, Homo sapiens
  Cdk2 ribozyme binding site
tcctaatattgtcaagctg

SEQ ID NO: 173 - DNA, 19 bp, Homo sapiens
  Cdk2 ribozyme binding site
taatattgtcaagctgctg

SEQ ID NO: 174 - DNA, 19 bp, Homo sapiens
  Cdk2 ribozyme binding site
gctggatgtcattcacaca

SEQ ID NO: 175 - DNA, 19 bp, Homo sapiens
  Cdk2 ribozyme binding site
ggatgtcattcacacagaa

SEQ ID NO: 176 - DNA, 19 bp, Homo sapiens
  Cdk2 ribozyme binding site
gatgtcattcacacagaaa

SEQ ID NO: 177 - DNA, 19 bp, Homo sapiens
  Cdk2 ribozyme binding site
acagaaaataaactctacc

SEQ ID NO: 178 - DNA, 19 bp, Homo sapiens
  Cdk2 ribozyme binding site
aaataaactctacctggtt

SEQ ID NO: 179 - DNA, 19 bp, Homo sapiens
  Cdk2 ribozyme binding site
ataaactctacctggtttt

SEQ ID NO: 180 - DNA, 19 bp, Homo sapiens
  Cdk2 ribozyme binding site
ctacctggtttttgaattt

SEQ ID NO: 181 - DNA, 19 bp, Homo sapiens
  Cdk2 ribozyme binding site
tacctggtttttgaatttc

SEQ ID NO: 182 - DNA, 19 bp, Homo sapiens
  Cdk2 ribozyme binding site
acctggtttttgaatttct

SEQ ID NO: 183 - DNA, 19 bp, Homo sapiens
  Cdk2 ribozyme binding site
cctggtttttgaatttctg

SEQ ID NO: 184 - DNA, 19 bp, Homo sapiens
  Cdk2 ribozyme binding site
tttttgaatttctgcacca

SEQ ID NO: 185 - DNA, 19 bp, Homo sapiens
  Cdk2 ribozyme binding site
ttttgaatttctgcaccaa

SEQ ID NO: 186 - DNA, 19 bp, Homo sapiens
  Cdk2 ribozyme binding site
tttgaatttctgcaccaag

SEQ ID NO: 187 - DNA, 19 bp, Homo sapiens
  Cdk2 ribozyme binding site
caccaagatctcaagaaat

SEQ ID NO: 188 - DNA, 19 bp, Homo sapiens
  Cdk2 ribozyme binding site
ccaagatctcaagaaattc

SEQ ID NO: 189 - DNA, 19 bp, Homo sapiens
  Cdk2 ribozyme binding site
tcaagaaattcatggatgc

SEQ ID NO: 190 - DNA, 19 bp, Homo sapiens
  Cdk2 ribozyme binding site
caagaaattcatggatgcc

SEQ ID NO: 191 - DNA, 19 bp, Homo sapiens
  Cdk2 ribozyme binding site
tggatgcctctgctctcac

SEQ ID NO: 192 - DNA, 19 bp, Homo sapiens
  Cdk2 ribozyme binding site
gcctctgctctcactggca

SEQ ID NO: 193 - DNA, 19 bp, Homo sapiens
  Cdk2 ribozyme binding site
ctctgctctcactggcatt

SEQ ID NO: 194 - DNA, 19 bp, Homo sapiens
  Cdk2 ribozyme binding site
cactggcattcctcttccc

SEQ ID NO: 195 - DNA, 19 bp, Homo sapiens
  Cdk2 ribozyme binding site
actggcattcctcttcccc

SEQ ID NO: 196 - DNA, 19 bp, Homo sapiens
  Cdk2 ribozyme binding site
ggcattcctcttcccctca

SEQ ID NO: 197 - DNA, 19 bp, Homo sapiens
  Cdk2 ribozyme binding site
cattcctcttcccctcatc

SEQ ID NO: 198 - DNA, 19 bp, Homo sapiens
  Cdk2 ribozyme binding site
attcctcttcccctcatca

SEQ ID NO: 199 - DNA, 19 bp, Homo sapiens
  Cdk2 ribozyme binding site
tcttcccctcatcaagagc

SEQ ID NO: 200 - DNA, 19 bp, Homo sapiens
  Cdk2 ribozyme binding site
tcccctcatcaagagctat

SEQ ID NO: 201 - DNA, 19 bp, Homo sapiens
  Cdk2 ribozyme binding site
tcaagagctatctgttcca

SEQ ID NO: 202 - DNA, 19 bp, Homo sapiens
  Cdk2 ribozyme binding site
aagagctatctgttccagc

SEQ ID NO: 203 - DNA, 19 bp, Homo sapiens
  Cdk2 ribozyme binding site
gctatctgttccagctgct

SEQ ID NO: 204 - DNA, 19 bp, Homo sapiens
  Cdk2 ribozyme binding site
ctatctgttccagctgctc

SEQ ID NO: 205 - DNA, 19 bp, Homo sapiens
  Cdk2 ribozyme binding site
ccagctgctccagggccta

SEQ ID NO: 206 - DNA, 19 bp, Homo sapiens
  Cdk2 ribozyme binding site
ccagggcctagctttctgc

SEQ ID NO: 207 - DNA, 19 bp, Homo sapiens
  Cdk2 ribozyme binding site
ggcctagctttctgccatt

SEQ ID NO: 208 - DNA, 19 bp, Homo sapiens
  Cdk2 ribozyme binding site
gcctagctttctgccattc

SEQ ID NO: 209 - DNA, 19 bp, Homo sapiens
  Cdk2 ribozyme binding site
cctagctttctgccattct

SEQ ID NO: 210 - DNA, 19 bp, Homo sapiens
  Cdk2 ribozyme binding site
ttctgccattctcatcggg

SEQ ID NO: 211 - DNA, 19 bp, Homo sapiens
  Cdk2 ribozyme binding site
tctgccattctcatcgggt

SEQ ID NO: 212 - DNA, 19 bp, Homo sapiens
  Cdk2 ribozyme binding site
tgccattctcatcgggtcc

SEQ ID NO: 213 - DNA, 19 bp, Homo sapiens
  Cdk2 ribozyme binding site
cattctcatcgggtcctcc

SEQ ID NO: 214 - DNA, 19 bp, Homo sapiens
  Cdk2 ribozyme binding site
tcatcgggtcctccaccga

SEQ ID NO: 215 - DNA, 19 bp, Homo sapiens
  Cdk2 ribozyme binding site
tcgggtcctccaccgagac

SEQ ID NO: 216 - DNA, 19 bp, Homo sapiens
  Cdk2 ribozyme binding site
ccgagaccttaaacctcag

SEQ ID NO: 217 - DNA, 19 bp, Homo sapiens
  Cdk2 ribozyme binding site
cgagaccttaaacctcaga

SEQ ID NO: 218 - DNA, 19 bp, Homo sapiens
  Cdk2 ribozyme binding site
cttaaacctcagaatctgc

SEQ ID NO: 219 - DNA, 19 bp, Homo sapiens
  Cdk2 ribozyme binding site
cctcagaatctgcttatta

SEQ ID NO: 220 - DNA, 19 bp, Homo sapiens
  Cdk2 ribozyme binding site
gaatctgcttattaacaca

SEQ ID NO: 221 - DNA, 19 bp, Homo sapiens
  Cdk2 ribozyme binding site
aatctgcttattaacacag

SEQ ID NO: 222 - DNA, 19 bp, Homo sapiens
  Cdk2 ribozyme binding site
tctgcttattaacacagag

SEQ ID NO: 223 - DNA, 19 bp, Homo sapiens
  Cdk2 ribozyme binding site
ctgcttattaacacagagg

SEQ ID NO: 224 - DNA, 19 bp, Homo sapiens
  Cdk2 ribozyme binding site
gggggccatcaagctagca

SEQ ID NO: 225 - DNA, 19 bp, Homo sapiens
  Cdk2 ribozyme binding site
catcaagctagcagacttt

SEQ ID NO: 226 - DNA, 19 bp, Homo sapiens
  Cdk2 ribozyme binding site
tagcagactttggactagc

SEQ ID NO: 227 - DNA, 19 bp, Homo sapiens
  Cdk2 ribozyme binding site
agcagactttggactagcc

SEQ ID NO: 228 - DNA, 19 bp, Homo sapiens
  Cdk2 ribozyme binding site
ctttggactagccagagct

SEQ ID NO: 229 - DNA, 19 bp, Homo sapiens
  Cdk2 ribozyme binding site
gccagagcttttggagtcc

SEQ ID NO: 230 - DNA, 19 bp, Homo sapiens
  Cdk2 ribozyme binding site
ccagagcttttggagtccc

SEQ ID NO: 231 - DNA, 19 bp, Homo sapiens
  Cdk2 ribozyme binding site
cagagcttttggagtccct

SEQ ID NO: 232 - DNA, 19 bp, Homo sapiens
  Cdk2 ribozyme binding site
ttttggagtccctgttcgt

SEQ ID NO: 233 - DNA, 19 bp, Homo sapiens
  Cdk2 ribozyme binding site
agtccctgttcgtacttac

SEQ ID NO: 234 - DNA, 19 bp, Homo sapiens
  Cdk2 ribozyme binding site
gtccctgttcgtacttaca

SEQ ID NO: 235 - DNA, 19 bp, Homo sapiens
  Cdk2 ribozyme binding site
cctgttcgtacttacaccc

SEQ ID NO: 236 - DNA, 19 bp, Homo sapiens
  Cdk2 ribozyme binding site
gttcgtacttacacccatg

SEQ ID NO: 237 - DNA, 19 bp, Homo sapiens
  Cdk2 ribozyme binding site
ttcgtacttacacccatga

SEQ ID NO: 238 - DNA, 19 bp, Homo sapiens
  Cdk2 ribozyme binding site
ccctgtggtaccgagctcc

SEQ ID NO: 239 - DNA, 19 bp, Homo sapiens
  Cdk2 ribozyme binding site
taccgagctcctgaaatcc

SEQ ID NO: 240 - DNA, 19 bp, Homo sapiens
  Cdk2 ribozyme binding site
tcctgaaatcctcctgggc

SEQ ID NO: 241 - DNA, 19 bp, Homo sapiens
  Cdk2 ribozyme binding site
tgaaatcctcctgggctgc

SEQ ID NO: 242 - DNA, 19 bp, Homo sapiens
  Cdk2 ribozyme binding site
gctgcaaatattattccac

SEQ ID NO: 243 - DNA, 19 bp, Homo sapiens
  Cdk2 ribozyme binding site
tgcaaatattattccacag

SEQ ID NO: 244 - DNA, 19 bp, Homo sapiens
  Cdk2 ribozyme binding site
gcaaatattattccacagc

SEQ ID NO: 245 - DNA, 19 bp, Homo sapiens
  Cdk2 ribozyme binding site
aaatattattccacagctg

SEQ ID NO: 246 - DNA, 19 bp, Homo sapiens
  Cdk2 ribozyme binding site
aatattattccacagctgt

SEQ ID NO: 247 - DNA, 19 bp, Homo sapiens
  Cdk2 ribozyme binding site
tgtggacatctggagcctg

SEQ ID NO: 248 - DNA, 19 bp, Homo sapiens
  Cdk2 ribozyme binding site
gggctgcatctttgctgag

SEQ ID NO: 249 - DNA, 19 bp, Homo sapiens
  Cdk2 ribozyme binding site
gctgcatctttgctgagat

SEQ ID NO: 250 - DNA, 19 bp, Homo sapiens
  Cdk2 ribozyme binding site
ctgcatctttgctgagatg

SEQ ID NO: 251 - DNA, 19 bp, Homo sapiens
  Cdk2 ribozyme binding site
atggtgactcgccgggccc

SEQ ID NO: 252 - DNA, 19 bp, Homo sapiens
  Cdk2 ribozyme binding site
ccgggccctattccctgga

SEQ ID NO: 253 - DNA, 19 bp, Homo sapiens
  Cdk2 ribozyme binding site
gggccctattccctggaga

SEQ ID NO: 254 - DNA, 19 bp, Homo sapiens
  Cdk2 ribozyme binding site
ggccctattccctggagat

SEQ ID NO: 255 - DNA, 19 bp, Homo sapiens
  Cdk2 ribozyme binding site
cctggagattctgagattg

SEQ ID NO: 256 - DNA, 19 bp, Homo sapiens
  Cdk2 ribozyme binding site
ctggagattctgagattga

SEQ ID NO: 257 - DNA, 19 bp, Homo sapiens
  Cdk2 ribozyme binding site
ttctgagattgaccagctc

SEQ ID NO: 258 - DNA, 19 bp, Homo sapiens
  Cdk2 ribozyme binding site
tgaccagctcttccggatc

SEQ ID NO: 259 - DNA, 19 bp, Homo sapiens
  Cdk2 ribozyme binding site
accagctcttccggatctt

SEQ ID NO: 260 - DNA, 19 bp, Homo sapiens
  Cdk2 ribozyme binding site
ccagctcttccggatcttt

SEQ ID NO: 261 - DNA, 19 bp, Homo sapiens
  Cdk2 ribozyme binding site
cttccggatctttcggact

SEQ ID NO: 262 - DNA, 19 bp, Homo sapiens
  Cdk2 ribozyme binding site
tccggatctttcggactct

SEQ ID NO: 263 - DNA, 19 bp, Homo sapiens
  Cdk2 ribozyme binding site
ccggatctttcggactctg

SEQ ID NO: 264 - DNA, 19 bp, Homo sapiens
  Cdk2 ribozyme binding site
cggatctttcggactctgg

SEQ ID NO: 265 - DNA, 19 bp, Homo sapiens
  Cdk2 ribozyme binding site
tttcggactctggggaccc

SEQ ID NO: 266 - DNA, 19 bp, Homo sapiens
  Cdk2 ribozyme binding site
gccaggagttacttctatg

SEQ ID NO: 267 - DNA, 19 bp, Homo sapiens
  Cdk2 ribozyme binding site
ccaggagttacttctatgc

SEQ ID NO: 268 - DNA, 19 bp, Homo sapiens
  Cdk2 ribozyme binding site
ggagttacttctatgcctg

SEQ ID NO: 269 - DNA, 19 bp, Homo sapiens
  Cdk2 ribozyme binding site
gagttacttctatgcctga

SEQ ID NO: 270 - DNA, 19 bp, Homo sapiens
  Cdk2 ribozyme binding site
gttacttctatgcctgatt

SEQ ID NO: 271 - DNA, 19 bp, Homo sapiens
  Cdk2 ribozyme binding site
atgcctgattacaagccaa

SEQ ID NO: 272 - DNA, 19 bp, Homo sapiens
  Cdk2 ribozyme binding site
tgcctgattacaagccaag

SEQ ID NO: 273 - DNA, 19 bp, Homo sapiens
  Cdk2 ribozyme binding site
aagccaagtttccccaagt

SEQ ID NO: 274 - DNA, 19 bp, Homo sapiens
  Cdk2 ribozyme binding site
agccaagtttccccaagtg

SEQ ID NO: 275 - DNA, 19 bp, Homo sapiens
  Cdk2 ribozyme binding site
gccaagtttccccaagtgg

SEQ ID NO: 276 - DNA, 19 bp, Homo sapiens
  Cdk2 ribozyme binding site
cggcaagattttagtaaag

SEQ ID NO: 277 - DNA, 19 bp, Homo sapiens
  Cdk2 ribozyme binding site
ggcaagattttagtaaagt

SEQ ID NO: 278 - DNA, 19 bp, Homo sapiens
  Cdk2 ribozyme binding site
gcaagattttagtaaagtt

SEQ ID NO: 279 - DNA, 19 bp, Homo sapiens
  Cdk2 ribozyme binding site
caagattttagtaaagttg

SEQ ID NO: 280 - DNA, 19 bp, Homo sapiens
  Cdk2 ribozyme binding site
gattttagtaaagttgtac

SEQ ID NO: 281 - DNA, 19 bp, Homo sapiens
  Cdk2 ribozyme binding site
tagtaaagttgtacctccc

SEQ ID NO: 282 - DNA, 19 bp, Homo sapiens
  Cdk2 ribozyme binding site
taaagttgtacctcccctg

SEQ ID NO: 283 - DNA, 19 bp, Homo sapiens
  Cdk2 ribozyme binding site
gttgtacctcccctggatg

SEQ ID NO: 284 - DNA, 19 bp, Homo sapiens
  Cdk2 ribozyme binding site
gacggagcttgttatcgca

SEQ ID NO: 285 - DNA, 19 bp, Homo sapiens
  Cdk2 ribozyme binding site
ggagcttgttatcgcaaat

SEQ ID NO: 286 - DNA, 19 bp, Homo sapiens
  Cdk2 ribozyme binding site
gagcttgttatcgcaaatg

SEQ ID NO: 287 - DNA, 19 bp, Homo sapiens
  Cdk2 ribozyme binding site
gcttgttatcgcaaatgct

SEQ ID NO: 288 - DNA, 19 bp, Homo sapiens
  Cdk2 ribozyme binding site
tgctgcactacgaccctaa

SEQ ID NO: 289 - DNA, 19 bp, Homo sapiens
  Cdk2 ribozyme binding site
tacgaccctaacaagcgga

SEQ ID NO: 290 - DNA, 19 bp, Homo sapiens
  Cdk2 ribozyme binding site
caagcggatttcggccaag

SEQ ID NO: 291 - DNA, 19 bp, Homo sapiens
  Cdk2 ribozyme binding site
aagcggatttcggccaagg

SEQ ID NO: 292 - DNA, 19 bp, Homo sapiens
  Cdk2 ribozyme binding site
agcggatttcggccaaggc

SEQ ID NO: 293 - DNA, 19 bp, Homo sapiens
  Cdk2 ribozyme binding site
gccctggctcaccctttct

SEQ ID NO: 294 - DNA, 19 bp, Homo sapiens
  Cdk2 ribozyme binding site
gctcaccctttcttccagg

SEQ ID NO: 295 - DNA, 19 bp, Homo sapiens
  Cdk2 ribozyme binding site
ctcaccctttcttccagga

SEQ ID NO: 296 - DNA, 19 bp, Homo sapiens
  Cdk2 ribozyme binding site
tcaccctttcttccaggat

SEQ ID NO: 297 - DNA, 19 bp, Homo sapiens
  Cdk2 ribozyme binding site
accctttcttccaggatgt

SEQ ID NO: 298 - DNA, 19 bp, Homo sapiens
  Cdk2 ribozyme binding site
ccctttcttccaggatgtg

SEQ ID NO: 299 - DNA, 19 bp, Homo sapiens
  Cdk2 ribozyme binding site
caagccagtaccccatctt

SEQ ID NO: 300 - DNA, 19 bp, Homo sapiens
  Cdk2 ribozyme binding site
gtaccccatcttcgactct

SEQ ID NO: 301 - DNA, 19 bp, Homo sapiens
  Cdk2 ribozyme binding site
accccatcttcgactctga

SEQ ID NO: 302 - DNA, 19 bp, Homo sapiens
  Cdk3 ribozyme binding site
tggatatgttccagaaggt

SEQ ID NO: 303 - DNA, 19 bp, Homo sapiens
  Cdk3 ribozyme binding site
ggatatgttccagaaggta

SEQ ID NO: 304 - DNA, 19 bp, Homo sapiens
  Cdk3 ribozyme binding site
ccagaaggtagagaagatc

SEQ ID NO: 305 - DNA, 19 bp, Homo sapiens
  Cdk3 ribozyme binding site
agagaagatcggagagggc

SEQ ID NO: 306 - DNA, 19 bp, Homo sapiens
  Cdk3 ribozyme binding site
agggcacctatggggtggt

SEQ ID NO: 307 - DNA, 19 bp, Homo sapiens
  Cdk3 ribozyme binding site
gggtggtgtacaaggccaa

SEQ ID NO: 308 - DNA, 19 bp, Homo sapiens
  Cdk3 ribozyme binding site
gaagaagatcagactggat

SEQ ID NO: 309 - DNA, 19 bp, Homo sapiens
  Cdk3 ribozyme binding site
agactggatttggagatgg

SEQ ID NO: 310 - DNA, 19 bp, Homo sapiens
  Cdk3 ribozyme binding site
gactggatttggagatgga

SEQ ID NO: 311 - DNA, 19 bp, Homo sapiens
  Cdk3 ribozyme binding site
ggagggggtcccaagcact

SEQ ID NO: 312 - DNA, 19 bp, Homo sapiens
  Cdk3 ribozyme binding site
cactgccatcagggagatc

SEQ ID NO: 313 - DNA, 19 bp, Homo sapiens
  Cdk3 ribozyme binding site
cagggagatctcgctgctc

SEQ ID NO: 314 - DNA, 19 bp, Homo sapiens
  Cdk3 ribozyme binding site
gggagatctcgctgctcaa

SEQ ID NO: 315 - DNA, 19 bp, Homo sapiens
  Cdk3 ribozyme binding site
ctcgctgctcaaggaactg

SEQ ID NO: 316 - DNA, 19 bp, Homo sapiens
  Cdk3 ribozyme binding site
ccccaacatcgtccgactg

SEQ ID NO: 317 - DNA, 19 bp, Homo sapiens
  Cdk3 ribozyme binding site
caacatcgtccgactgctg

SEQ ID NO: 318 - DNA, 19 bp, Homo sapiens
  Cdk3 ribozyme binding site
gaggaagctctatctggtg

SEQ ID NO: 319 - DNA, 19 bp, Homo sapiens
  Cdk3 ribozyme binding site
ggaagctctatctggtgtt

SEQ ID NO: 320 - DNA, 19 bp, Homo sapiens
  Cdk3 ribozyme binding site
aagctctatctggtgtttg

SEQ ID NO: 321 - DNA, 19 bp, Homo sapiens
  Cdk3 ribozyme binding site
atctggtgtttgagttcct

SEQ ID NO: 322 - DNA, 19 bp, Homo sapiens
  Cdk3 ribozyme binding site
tctggtgtttgagttcctc

SEQ ID NO: 323 - DNA, 19 bp, Homo sapiens
  Cdk3 ribozyme binding site
tgtttgagttcctcagcca

SEQ ID NO: 324 - DNA, 19 bp, Homo sapiens
  Cdk3 ribozyme binding site
gtttgagttcctcagccag

SEQ ID NO: 325 - DNA, 19 bp, Homo sapiens
  Cdk3 ribozyme binding site
tgagttcctcagccaggac

SEQ ID NO: 326 - DNA, 19 bp, Homo sapiens
  Cdk3 ribozyme binding site
tgaagaagtacatggactc

SEQ ID NO: 327 - DNA, 19 bp, Homo sapiens
  Cdk3 ribozyme binding site
acatggactccaccccagg

SEQ ID NO: 328 - DNA, 19 bp, Homo sapiens
  Cdk3 ribozyme binding site
ccccaggctcagagctccc

SEQ ID NO: 329 - DNA, 19 bp, Homo sapiens
  Cdk3 ribozyme binding site
ctcagagctccccctgcac

SEQ ID NO: 330 - DNA, 19 bp, Homo sapiens
  Cdk3 ribozyme binding site
cctgcacctcatcaagagc

SEQ ID NO: 331 - DNA, 19 bp, Homo sapiens
  Cdk3 ribozyme binding site
gcacctcatcaagagctac

SEQ ID NO: 332 - DNA, 19 bp, Homo sapiens
  Cdk3 ribozyme binding site
tcaagagctacctcttcca

SEQ ID NO: 333 - DNA, 19 bp, Homo sapiens
  Cdk3 ribozyme binding site
gagctacctcttccagctg

SEQ ID NO: 334 - DNA, 19 bp, Homo sapiens
  Cdk3 ribozyme binding site
gctacctcttccagctgct

SEQ ID NO: 335 - DNA, 19 bp, Homo sapiens
  Cdk3 ribozyme binding site
ctacctcttccagctgctg

SEQ ID NO: 336 - DNA, 19 bp, Homo sapiens
  Cdk3 ribozyme binding site
ggggtgagtttctgccact

SEQ ID NO: 337 - DNA, 19 bp, Homo sapiens
  Cdk3 ribozyme binding site
gggtgagtttctgccactc

SEQ ID NO: 338 - DNA, 19 bp, Homo sapiens
  Cdk3 ribozyme binding site
ggtgagtttctgccactca

SEQ ID NO: 339 - DNA, 19 bp, Homo sapiens
  Cdk3 ribozyme binding site
tctgccactcacatcgggt

SEQ ID NO: 340 - DNA, 19 bp, Homo sapiens
  Cdk3 ribozyme binding site
cactcacatcgggtcatcc

SEQ ID NO: 341 - DNA, 19 bp, Homo sapiens
  Cdk3 ribozyme binding site
acatcgggtcatccaccga

SEQ ID NO: 342 - DNA, 19 bp, Homo sapiens
  Cdk3 ribozyme binding site
tcgggtcatccaccgagac

SEQ ID NO: 343 - DNA, 19 bp, Homo sapiens
  Cdk3 ribozyme binding site
gaacctgctcatcaatgag

SEQ ID NO: 344 - DNA, 19 bp, Homo sapiens
  Cdk3 ribozyme binding site
cctgctcatcaatgagttg

SEQ ID NO: 345 - DNA, 19 bp, Homo sapiens
  Cdk3 ribozyme binding site
tcaatgagttgggtgccat

SEQ ID NO: 346 - DNA, 19 bp, Homo sapiens
  Cdk3 ribozyme binding site
gggtgccatcaagctggct

SEQ ID NO: 347 - DNA, 19 bp, Homo sapiens
  Cdk3 ribozyme binding site
tggctgacttcggcctggc

SEQ ID NO: 348 - DNA, 19 bp, Homo sapiens
  Cdk3 ribozyme binding site
ggctgacttcggcctggct

SEQ ID NO: 349 - DNA, 19 bp, Homo sapiens
  Cdk3 ribozyme binding site
ggcctggctcgcgccttcg

SEQ ID NO: 350 - DNA, 19 bp, Homo sapiens
  Cdk3 ribozyme binding site
tcgcgccttcggggtgccc

SEQ ID NO: 351 - DNA, 19 bp, Homo sapiens
  Cdk3 ribozyme binding site
tgcgcacctacacccatga

SEQ ID NO: 352 - DNA, 19 bp, Homo sapiens
  Cdk3 ribozyme binding site
cactgtggtatcgcgcccc

SEQ ID NO: 353 - DNA, 19 bp, Homo sapiens
  Cdk3 ribozyme binding site
ctgtggtatcgcgcccccg

SEQ ID NO: 354 - DNA, 19 bp, Homo sapiens
  Cdk3 ribozyme binding site
ccccgagattctcttgggc

SEQ ID NO: 355 - DNA, 19 bp, Homo sapiens
  Cdk3 ribozyme binding site
cccgagattctcttgggca

SEQ ID NO: 356 - DNA, 19 bp, Homo sapiens
  Cdk3 ribozyme binding site
cgagattctcttgggcagc

SEQ ID NO: 357 - DNA, 19 bp, Homo sapiens
  Cdk3 ribozyme binding site
agattctcttgggcagcaa

SEQ ID NO: 358 - DNA, 19 bp, Homo sapiens
  Cdk3 ribozyme binding site
gcagcaagttctataccac

SEQ ID NO: 359 - DNA, 19 bp, Homo sapiens
  Cdk3 ribozyme binding site
cagcaagttctataccaca

SEQ ID NO: 360 - DNA, 19 bp, Homo sapiens
  Cdk3 ribozyme binding site
gcaagttctataccacagc

SEQ ID NO: 361 - DNA, 19 bp, Homo sapiens
  Cdk3 ribozyme binding site
aagttctataccacagctg

SEQ ID NO: 362 - DNA, 19 bp, Homo sapiens
  Cdk3 ribozyme binding site
gctgtggatatctggagca

SEQ ID NO: 363 - DNA, 19 bp, Homo sapiens
  Cdk3 ribozyme binding site
tgtggatatctggagcatt

SEQ ID NO: 364 - DNA, 19 bp, Homo sapiens
  Cdk3 ribozyme binding site
ctggagcattggttgcatc

SEQ ID NO: 365 - DNA, 19 bp, Homo sapiens
  Cdk3 ribozyme binding site
agcattggttgcatctttg

SEQ ID NO: 366 - DNA, 19 bp, Homo sapiens
  Cdk3 ribozyme binding site
tggttgcatctttgcagag

SEQ ID NO: 367 - DNA, 19 bp, Homo sapiens
  Cdk3 ribozyme binding site
gttgcatctttgcagagat

SEQ ID NO: 368 - DNA, 19 bp, Homo sapiens
  Cdk3 ribozyme binding site
ttgcatctttgcagagatg

SEQ ID NO: 369 - DNA, 19 bp, Homo sapiens
  Cdk3 ribozyme binding site
atggtgactcgaaaagccc

SEQ ID NO: 370 - DNA, 19 bp, Homo sapiens
  Cdk3 ribozyme binding site
aagccctgtttcctggtga

SEQ ID NO: 371 - DNA, 19 bp, Homo sapiens
  Cdk3 ribozyme binding site
agccctgtttcctggtgac

SEQ ID NO: 372 - DNA, 19 bp, Homo sapiens
  Cdk3 ribozyme binding site
gccctgtttcctggtgact

SEQ ID NO: 373 - DNA, 19 bp, Homo sapiens
  Cdk3 ribozyme binding site
ctggtgactctgagattga

SEQ ID NO: 374 - DNA, 19 bp, Homo sapiens
  Cdk3 ribozyme binding site
ctctgagattgaccagctc

SEQ ID NO: 375 - DNA, 19 bp, Homo sapiens
  Cdk3 ribozyme binding site
tgaccagctctttcgtatc

SEQ ID NO: 376 - DNA, 19 bp, Homo sapiens
  Cdk3 ribozyme binding site
accagctctttcgtatctt

SEQ ID NO: 377 - DNA, 19 bp, Homo sapiens
  Cdk3 ribozyme binding site
ccagctctttcgtatcttt

SEQ ID NO: 378 - DNA, 19 bp, Homo sapiens
  Cdk3 ribozyme binding site
cagctctttcgtatctttc

SEQ ID NO: 379 - DNA, 19 bp, Homo sapiens
  Cdk3 ribozyme binding site
ctctttcgtatctttcgta

SEQ ID NO: 380 - DNA, 19 bp, Homo sapiens
  Cdk3 ribozyme binding site
ctttcgtatctttcgtatg

SEQ ID NO: 381 - DNA, 19 bp, Homo sapiens
  Cdk3 ribozyme binding site
ttcgtatctttcgtatgct

SEQ ID NO: 382 - DNA, 19 bp, Homo sapiens
  Cdk3 ribozyme binding site
tcgtatctttcgtatgctg

SEQ ID NO: 383 - DNA, 19 bp, Homo sapiens
  Cdk3 ribozyme binding site
cgtatctttcgtatgctgg

SEQ ID NO: 384 - DNA, 19 bp, Homo sapiens
  Cdk3 ribozyme binding site
atctttcgtatgctgggga

SEQ ID NO: 385 - DNA, 19 bp, Homo sapiens
  Cdk3 ribozyme binding site
gcccggggtcacccagctg

SEQ ID NO: 386 - DNA, 19 bp, Homo sapiens
  Cdk3 ribozyme binding site
tgcctgactataagggcag

SEQ ID NO: 387 - DNA, 19 bp, Homo sapiens
  Cdk3 ribozyme binding site
cctgactataagggcagct

SEQ ID NO: 388 - DNA, 19 bp, Homo sapiens
  Cdk3 ribozyme binding site
agggcagcttccctaagtg

SEQ ID NO: 389 - DNA, 19 bp, Homo sapiens
  Cdk3 ribozyme binding site
gggcagcttccctaagtgg

SEQ ID NO: 390 - DNA, 19 bp, Homo sapiens
  Cdk3 ribozyme binding site
agcttccctaagtggacca

SEQ ID NO: 391 - DNA, 19 bp, Homo sapiens
  Cdk3 ribozyme binding site
ggaagagattgtgcccaat

SEQ ID NO: 392 - DNA, 19 bp, Homo sapiens
  Cdk3 ribozyme binding site
gtgcccaatctggagccag

SEQ ID NO: 393 - DNA, 19 bp, Homo sapiens
  Cdk3 ribozyme binding site
ggacctgctcatgcaactc

SEQ ID NO: 394 - DNA, 19 bp, Homo sapiens
  Cdk3 ribozyme binding site
catgcaactcctgcagtat

SEQ ID NO: 395 - DNA, 19 bp, Homo sapiens
  Cdk3 ribozyme binding site
tcctgcagtatgaccccag

SEQ ID NO: 396 - DNA, 19 bp, Homo sapiens
  Cdk3 ribozyme binding site
ccagcggatcacagccaag

SEQ ID NO: 397 - DNA, 19 bp, Homo sapiens
  Cdk3 ribozyme binding site
cccacccgtacttctcatc

SEQ ID NO: 398 - DNA, 19 bp, Homo sapiens
  Cdk3 ribozyme binding site
acccgtacttctcatcccc

SEQ ID NO: 399 - DNA, 19 bp, Homo sapiens
  Cdk3 ribozyme binding site
cccgtacttctcatcccct

SEQ ID NO: 400 - DNA, 19 bp, Homo sapiens
  Cdk3 ribozyme binding site
cgtacttctcatcccctga

SEQ ID NO: 401 - DNA, 19 bp, Homo sapiens
  Cdk3 ribozyme binding site
acttctcatcccctgagcc

SEQ ID NO: 402 - DNA, 19 bp, Homo sapiens
  Cdk3 ribozyme binding site
ctgagccctccccagctgc

SEQ ID NO: 403 - DNA, 19 bp, Homo sapiens
  Cdk3 ribozyme binding site
cccgccagtatgtgctgca

SEQ ID NO: 404 - DNA, 19 bp, Homo sapiens
  Cdk3 ribozyme binding site
tgcagcgattccgccattg

SEQ ID NO: 405 - DNA, 19 bp, Homo sapiens
  Cdk3 ribozyme binding site
gcagcgattccgccattga

SEQ ID NO: 406 - DNA, 19 bp, Homo sapiens
  Cdk4 ribozyme binding site
tggctacctctcgatatga

SEQ ID NO: 407 - DNA, 19 bp, Homo sapiens
  Cdk4 ribozyme binding site
gctacctctcgatatgagc

SEQ ID NO: 408 - DNA, 19 bp, Homo sapiens
  Cdk4 ribozyme binding site
cctctcgatatgagccagt

SEQ ID NO: 409 - DNA, 19 bp, Homo sapiens
  Cdk4 ribozyme binding site
ggctgaaattggtgtcggt

SEQ ID NO: 410 - DNA, 19 bp, Homo sapiens
  Cdk4 ribozyme binding site
aattggtgtcggtgcctat

SEQ ID NO: 411 - DNA, 19 bp, Homo sapiens
  Cdk4 ribozyme binding site
tcggtgcctatgggacagt

SEQ ID NO: 412 - DNA, 19 bp, Homo sapiens
  Cdk4 ribozyme binding site
ggacagtgtacaaggcccg

SEQ ID NO: 413 - DNA, 19 bp, Homo sapiens
  Cdk4 ribozyme binding site
gcccgtgatccccacagtg

SEQ ID NO: 414 - DNA, 19 bp, Homo sapiens
  Cdk4 ribozyme binding site
gtggccactttgtggccct

SEQ ID NO: 415 - DNA, 19 bp, Homo sapiens
  Cdk4 ribozyme binding site
tggccactttgtggccctc

SEQ ID NO: 416 - DNA, 19 bp, Homo sapiens
  Cdk4 ribozyme binding site
tgtggccctcaagagtgtg

SEQ ID NO: 417 - DNA, 19 bp, Homo sapiens
  Cdk4 ribozyme binding site
tgtgagagtccccaatgga

SEQ ID NO: 418 - DNA, 19 bp, Homo sapiens
  Cdk4 ribozyme binding site
aggaggccttcccatcagc

SEQ ID NO: 419 - DNA, 19 bp, Homo sapiens
  Cdk4 ribozyme binding site
ggaggccttcccatcagca

SEQ ID NO: 420 - DNA, 19 bp, Homo sapiens
  Cdk4 ribozyme binding site
ccttcccatcagcacagtt

SEQ ID NO: 421 - DNA, 19 bp, Homo sapiens
  Cdk4 ribozyme binding site
cagcacagttcgtgaggtg

SEQ ID NO: 422 - DNA, 19 bp, Homo sapiens
  Cdk4 ribozyme binding site
gaggtggctttactgaggc

SEQ ID NO: 423 - DNA, 19 bp, Homo sapiens
  Cdk4 ribozyme binding site
aggtggctttactgaggcg

SEQ ID NO: 424 - DNA, 19 bp, Homo sapiens
  Cdk4 ribozyme binding site
ggtggctttactgaggcga

SEQ ID NO: 425 - DNA, 19 bp, Homo sapiens
  Cdk4 ribozyme binding site
ctggaggcttttgagcatc

SEQ ID NO: 426 - DNA, 19 bp, Homo sapiens
  Cdk4 ribozyme binding site
tggaggcttttgagcatcc

SEQ ID NO: 427 - DNA, 19 bp, Homo sapiens
  Cdk4 ribozyme binding site
ggaggcttttgagcatccc

SEQ ID NO: 428 - DNA, 19 bp, Homo sapiens
  Cdk4 ribozyme binding site
tttgagcatcccaatgttg

SEQ ID NO: 429 - DNA, 19 bp, Homo sapiens
  Cdk4 ribozyme binding site
tcccaatgttgtccggctg

SEQ ID NO: 430 - DNA, 19 bp, Homo sapiens
  Cdk4 ribozyme binding site
caatgttgtccggctgatg

SEQ ID NO: 431 - DNA, 19 bp, Homo sapiens
  Cdk4 ribozyme binding site
gatggacgtctgtgccaca

SEQ ID NO: 432 - DNA, 19 bp, Homo sapiens
  Cdk4 ribozyme binding site
gtgccacatcccgaactga

SEQ ID NO: 433 - DNA, 19 bp, Homo sapiens
  Cdk4 ribozyme binding site
ccgggagatcaaggtaacc

SEQ ID NO: 434 - DNA, 19 bp, Homo sapiens
  Cdk4 ribozyme binding site
gatcaaggtaaccctggtg

SEQ ID NO: 435 - DNA, 19 bp, Homo sapiens
  Cdk4 ribozyme binding site
ccctggtgtttgagcatgt

SEQ ID NO: 436 - DNA, 19 bp, Homo sapiens
  Cdk4 ribozyme binding site
cctggtgtttgagcatgta

SEQ ID NO: 437 - DNA, 19 bp, Homo sapiens
  Cdk4 ribozyme binding site
tgagcatgtagaccaggac

SEQ ID NO: 438 - DNA, 19 bp, Homo sapiens
  Cdk4 ribozyme binding site
ccaggacctaaggacatat

SEQ ID NO: 439 - DNA, 19 bp, Homo sapiens
  Cdk4 ribozyme binding site
taaggacatatctggacaa

SEQ ID NO: 440 - DNA, 19 bp, Homo sapiens
  Cdk4 ribozyme binding site
aggacatatctggacaagg

SEQ ID NO: 441 - DNA, 19 bp, Homo sapiens
  Cdk4 ribozyme binding site
caccaggcttgccagccga

SEQ ID NO: 442 - DNA, 19 bp, Homo sapiens
  Cdk4 ribozyme binding site
cgaaacgatcaaggatctg

SEQ ID NO: 443 - DNA, 19 bp, Homo sapiens
  Cdk4 ribozyme binding site
atcaaggatctgatgcgcc

SEQ ID NO: 444 - DNA, 19 bp, Homo sapiens
  Cdk4 ribozyme binding site
tgcgccagtttctaagagg

SEQ ID NO: 445 - DNA, 19 bp, Homo sapiens
  Cdk4 ribozyme binding site
gcgccagtttctaagaggc

SEQ ID NO: 446 - DNA, 19 bp, Homo sapiens
  Cdk4 ribozyme binding site
cgccagtttctaagaggcc

SEQ ID NO: 447 - DNA, 19 bp, Homo sapiens
  Cdk4 ribozyme binding site
ccagtttctaagaggccta

SEQ ID NO: 448 - DNA, 19 bp, Homo sapiens
  Cdk4 ribozyme binding site
aagaggcctagatttcctt

SEQ ID NO: 449 - DNA, 19 bp, Homo sapiens
  Cdk4 ribozyme binding site
aggcctagatttccttcat

SEQ ID NO: 450 - DNA, 19 bp, Homo sapiens
  Cdk4 ribozyme binding site
gggcctagatttccttcat

SEQ ID NO: 451 - DNA, 19 bp, Homo sapiens
  Cdk4 ribozyme binding site
ggcctagatttccttcatg

SEQ ID NO: 452 - DNA, 19 bp, Homo sapiens
  Cdk4 ribozyme binding site
gcctagatttccttcatgc

SEQ ID NO: 453 - DNA, 19 bp, Homo sapiens
  Cdk4 ribozyme binding site
cctagatttccttcatgcc

SEQ ID NO: 454 - DNA, 19 bp, Homo sapiens
  Cdk4 ribozyme binding site
agatttccttcatgccaat

SEQ ID NO: 455 - DNA, 19 bp, Homo sapiens
  Cdk4 ribozyme binding site
gatttccttcatgccaatt

SEQ ID NO: 456 - DNA, 19 bp, Homo sapiens
  Cdk4 ribozyme binding site
catgccaattgcatcgttc

SEQ ID NO: 457 - DNA, 19 bp, Homo sapiens
  Cdk4 ribozyme binding site
caattgcatcgttcaccga

SEQ ID NO: 458 - DNA, 19 bp, Homo sapiens
  Cdk4 ribozyme binding site
ttgcatcgttcaccgagat

SEQ ID NO: 459 - DNA, 19 bp, Homo sapiens
  Cdk4 ribozyme binding site
tgcatcgttcaccgagatc

SEQ ID NO: 460 - DNA, 19 bp, Homo sapiens
  Cdk4 ribozyme binding site
caccgagatctgaagccag

SEQ ID NO: 461 - DNA, 19 bp, Homo sapiens
  Cdk4 ribozyme binding site
agagaacattctggtgaca

SEQ ID NO: 462 - DNA, 19 bp, Homo sapiens
  Cdk4 ribozyme binding site
gagaacattctggtgacaa

SEQ ID NO: 463 - DNA, 19 bp, Homo sapiens
  Cdk4 ribozyme binding site
tggaacagtcaagctggct

SEQ ID NO: 464 - DNA, 19 bp, Homo sapiens
  Cdk4 ribozyme binding site
tggctgactttggcctggc

SEQ ID NO: 465 - DNA, 19 bp, Homo sapiens
  Cdk4 ribozyme binding site
ggctgactttggcctggcc

SEQ ID NO: 466 - DNA, 19 bp, Homo sapiens
  Cdk4 ribozyme binding site
ggccagaatctacagctac

SEQ ID NO: 467 - DNA, 19 bp, Homo sapiens
  Cdk4 ribozyme binding site
ccagaatctacagctacca

SEQ ID NO: 468 - DNA, 19 bp, Homo sapiens
  Cdk4 ribozyme binding site
tctacagctaccagatggc

SEQ ID NO: 469 - DNA, 19 bp, Homo sapiens
  Cdk4 ribozyme binding site
atggcacttacacccgtgg

SEQ ID NO: 470 - DNA, 19 bp, Homo sapiens
  Cdk4 ribozyme binding site
acccgtggttgttacactc

SEQ ID NO: 471 - DNA, 19 bp, Homo sapiens
  Cdk4 ribozyme binding site
cgtggttgttacactctgg

SEQ ID NO: 472 - DNA, 19 bp, Homo sapiens
  Cdk4 ribozyme binding site
gtggttgttacactctggt

SEQ ID NO: 473 - DNA, 19 bp, Homo sapiens
  Cdk4 ribozyme binding site
tgttacactctggtaccga

SEQ ID NO: 474 - DNA, 19 bp, Homo sapiens
  Cdk4 ribozyme binding site
cactctggtaccgagctcc

SEQ ID NO: 475 - DNA, 19 bp, Homo sapiens
  Cdk4 ribozyme binding site
taccgagctcccgaagttc

SEQ ID NO: 476 - DNA, 19 bp, Homo sapiens
  Cdk4 ribozyme binding site
tcccgaagttcttctgcag

SEQ ID NO: 477 - DNA, 19 bp, Homo sapiens
  Cdk4 ribozyme binding site
cccgaagttcttctgcagt

SEQ ID NO: 478 - DNA, 19 bp, Homo sapiens
  Cdk4 ribozyme binding site
cgaagttcttctgcagtcc

SEQ ID NO: 479 - DNA, 19 bp, Homo sapiens
  Cdk4 ribozyme binding site
gaagttcttctgcagtcca

SEQ ID NO: 480 - DNA, 19 bp, Homo sapiens
  Cdk4 ribozyme binding site
agtccacatatgcaacacc

SEQ ID NO: 481 - DNA, 19 bp, Homo sapiens
  Cdk4 ribozyme binding site
gtggagtgttggctgtatc

SEQ ID NO: 482 - DNA, 19 bp, Homo sapiens
  Cdk4 ribozyme binding site
gttggctgtatctttgcag

SEQ ID NO: 483 - DNA, 19 bp, Homo sapiens
  Cdk4 ribozyme binding site
tggctgtatctttgcagag

SEQ ID NO: 484 - DNA, 19 bp, Homo sapiens
  Cdk4 ribozyme binding site
gctgtatctttgcagagat

SEQ ID NO: 485 - DNA, 19 bp, Homo sapiens
  Cdk4 ribozyme binding site
ctgtatctttgcagagatg

SEQ ID NO: 486 - DNA, 19 bp, Homo sapiens
  Cdk4 ribozyme binding site
cagagatgtttcgtcgaaa

SEQ ID NO: 487 - DNA, 19 bp, Homo sapiens
  Cdk4 ribozyme binding site
agagatgtttcgtcgaaag

SEQ ID NO: 488 - DNA, 19 bp, Homo sapiens
  Cdk4 ribozyme binding site
gagatgtttcgtcgaaagc

SEQ ID NO: 489 - DNA, 19 bp, Homo sapiens
  Cdk4 ribozyme binding site
atgtttcgtcgaaagcctc

SEQ ID NO: 490 - DNA, 19 bp, Homo sapiens
  Cdk4 ribozyme binding site
cgaaagcctctcttctgtg

SEQ ID NO: 491 - DNA, 19 bp, Homo sapiens
  Cdk4 ribozyme binding site
aaagcctctcttctgtgga

SEQ ID NO: 492 - DNA, 19 bp, Homo sapiens
  Cdk4 ribozyme binding site
agcctctcttctgtggaaa

SEQ ID NO: 493 - DNA, 19 bp, Homo sapiens
  Cdk4 ribozyme binding site
gcctctcttctgtggaaac

SEQ ID NO: 494 - DNA, 19 bp, Homo sapiens
  Cdk4 ribozyme binding site
gtggaaactctgaagccga

SEQ ID NO: 495 - DNA, 19 bp, Homo sapiens
  Cdk4 ribozyme binding site
ccgaccagttgggcaaaat

SEQ ID NO: 496 - DNA, 19 bp, Homo sapiens
  Cdk4 ribozyme binding site
gggcaaaatctttgacctg

SEQ ID NO: 497 - DNA, 19 bp, Homo sapiens
  Cdk4 ribozyme binding site
gcaaaatctttgacctgat

SEQ ID NO: 498 - DNA, 19 bp, Homo sapiens
  Cdk4 ribozyme binding site
caaaatctttgacctgatt

SEQ ID NO: 499 - DNA, 19 bp, Homo sapiens
  Cdk4 ribozyme binding site
tgacctgattgggctgcct

SEQ ID NO: 500 - DNA, 19 bp, Homo sapiens
  Cdk4 ribozyme binding site
gggctgcctccagaggatg

SEQ ID NO: 501 - DNA, 19 bp, Homo sapiens
  Cdk4 ribozyme binding site
gactggcctcgagatgtat

SEQ ID NO: 502 - DNA, 19 bp, Homo sapiens
  Cdk4 ribozyme binding site
tcgagatgtatccctgccc

SEQ ID NO: 503 - DNA, 19 bp, Homo sapiens
  Cdk4 ribozyme binding site
gagatgtatccctgccccg

SEQ ID NO: 504 - DNA, 19 bp, Homo sapiens
  Cdk4 ribozyme binding site
gtggagcctttccccccag

SEQ ID NO: 505 - DNA, 19 bp, Homo sapiens
  Cdk4 ribozyme binding site
tggagcctttccccccaga

SEQ ID NO: 506 - DNA, 19 bp, Homo sapiens
  Cdk4 ribozyme binding site
ggagcctttccccccagag

SEQ ID NO: 507 - DNA, 19 bp, Homo sapiens
  Cdk4 ribozyme binding site
cagtgcagtcggtggtacc

SEQ ID NO: 508 - DNA, 19 bp, Homo sapiens
  Cdk4 ribozyme binding site
gtcggtggtacctgagatg

SEQ ID NO: 509 - DNA, 19 bp, Homo sapiens
  Cdk4 ribozyme binding site
tggaggagtcgggagcaca

SEQ ID NO: 510 - DNA, 19 bp, Homo sapiens
  Cdk4 ribozyme binding site
atgctgacttttaacccac

SEQ ID NO: 511 - DNA, 19 bp, Homo sapiens
  Cdk4 ribozyme binding site
tgctgacttttaacccaca

SEQ ID NO: 512 - DNA, 19 bp, Homo sapiens
  Cdk4 ribozyme binding site
gctgacttttaacccacac

SEQ ID NO: 513 - DNA, 19 bp, Homo sapiens
  Cdk4 ribozyme binding site
ctgacttttaacccacaca

SEQ ID NO: 514 - DNA, 19 bp, Homo sapiens
  Cdk4 ribozyme binding site
caagcgaatctctgccttt

SEQ ID NO: 515 - DNA, 19 bp, Homo sapiens
  Cdk4 ribozyme binding site
agcgaatctctgcctttcg

SEQ ID NO: 516 - DNA, 19 bp, Homo sapiens
  Cdk4 ribozyme binding site
tctctgcctttcgagctct

SEQ ID NO: 517 - DNA, 19 bp, Homo sapiens
  Cdk4 ribozyme binding site
ctctgcctttcgagctctg

SEQ ID NO: 518 - DNA, 19 bp, Homo sapiens
  Cdk4 ribozyme binding site
tctgcctttcgagctctgc

SEQ ID NO: 519 - DNA, 19 bp, Homo sapiens
  Cdk4 ribozyme binding site
tttcgagctctgcagcact

SEQ ID NO: 520 - DNA, 19 bp, Homo sapiens
  Cdk4 ribozyme binding site
tgcagcactcttatctaca

SEQ ID NO: 521 - DNA, 19 bp, Homo sapiens
  Cdk4 ribozyme binding site
cagcactcttatctacata

SEQ ID NO: 522 - DNA, 19 bp, Homo sapiens
  Cdk4 ribozyme binding site
agcactcttatctacataa

SEQ ID NO: 523 - DNA, 19 bp, Homo sapiens
  Cdk4 ribozyme binding site
cactcttatctacataagg

SEQ ID NO: 524 - DNA, 19 bp, Homo sapiens
  Cdk4 ribozyme binding site
ctcttatctacataaggat

SEQ ID NO: 525 - DNA, 19 bp, Homo sapiens
  Cdk4 ribozyme binding site
tatctacataaggatgaag

SEQ ID NO: 526 - DNA, 19 bp, Homo sapiens
  Cdk4 ribozyme binding site
gatgaaggtaatccggagt

SEQ ID NO: 527 - DNA, 19 bp, Homo sapiens
  Cdk6 ribozyme binding site
accagcagtacgaatgcgt

SEQ ID NO: 528 - DNA, 19 bp, Homo sapiens
  Cdk6 ribozyme binding site
ggcggagatcggggagggc

SEQ ID NO: 529 - DNA, 19 bp, Homo sapiens
  Cdk6 ribozyme binding site
agggcgcctatgggaaggt

SEQ ID NO: 530 - DNA, 19 bp, Homo sapiens
  Cdk6 ribozyme binding site
ggaaggtgttcaaggcccg

SEQ ID NO: 531 - DNA, 19 bp, Homo sapiens
  Cdk6 ribozyme binding site
gaaggtgttcaaggcccgc

SEQ ID NO: 532 - DNA, 19 bp, Homo sapiens
  Cdk6 ribozyme binding site
cccgcgacttgaagaacgg

SEQ ID NO: 533 - DNA, 19 bp, Homo sapiens
  Cdk6 ribozyme binding site
ggaggccgtttcgtggcgt

SEQ ID NO: 534 - DNA, 19 bp, Homo sapiens
  Cdk6 ribozyme binding site
gaggccgtttcgtggcgtt

SEQ ID NO: 535 - DNA, 19 bp, Homo sapiens
  Cdk6 ribozyme binding site
aggccgtttcgtggcgttg

SEQ ID NO: 536 - DNA, 19 bp, Homo sapiens
  Cdk6 ribozyme binding site
tcgtggcgttgaagcgcgt

SEQ ID NO: 537 - DNA, 19 bp, Homo sapiens
  Cdk6 ribozyme binding site
catgccgctctccaccatc

SEQ ID NO: 538 - DNA, 19 bp, Homo sapiens
  Cdk6 ribozyme binding site
tgccgctctccaccatccg

SEQ ID NO: 539 - DNA, 19 bp, Homo sapiens
  Cdk6 ribozyme binding site
ctccaccatccgcgaggtg

SEQ ID NO: 540 - DNA, 19 bp, Homo sapiens
  Cdk6 ribozyme binding site
tggagaccttcgagcaccc

SEQ ID NO: 541 - DNA, 19 bp, Homo sapiens
  Cdk6 ribozyme binding site
ggagaccttcgagcacccc

SEQ ID NO: 542 - DNA, 19 bp, Homo sapiens
  Cdk6 ribozyme binding site
caacgtggtcaggttgttt

SEQ ID NO: 543 - DNA, 19 bp, Homo sapiens
  Cdk6 ribozyme binding site
tggtcaggttgtttgatgt

SEQ ID NO: 544 - DNA, 19 bp, Homo sapiens
  Cdk6 ribozyme binding site
tcaggttgtttgatgtgtg

SEQ ID NO: 545 - DNA, 19 bp, Homo sapiens
  Cdk6 ribozyme binding site
caggttgtttgatgtgtgc

SEQ ID NO: 546 - DNA, 19 bp, Homo sapiens
  Cdk6 ribozyme binding site
gcacagtgtcacgaacaga

SEQ ID NO: 547 - DNA, 19 bp, Homo sapiens
  Cdk6 ribozyme binding site
aaactaactttagtgtttg

SEQ ID NO: 548 - DNA, 19 bp, Homo sapiens
  Cdk6 ribozyme binding site
aactaactttagtgtttga

SEQ ID NO: 549 - DNA, 19 bp, Homo sapiens
  Cdk6 ribozyme binding site
actaactttagtgtttgaa

SEQ ID NO: 550 - DNA, 19 bp, Homo sapiens
  Cdk6 ribozyme binding site
ctttagtgtttgaacatgt

SEQ ID NO: 551 - DNA, 19 bp, Homo sapiens
  Cdk6 ribozyme binding site
tttagtgtttgaacatgtc

SEQ ID NO: 552 - DNA, 19 bp, Homo sapiens
  Cdk6 ribozyme binding site
tgaacatgtcgatcaagac

SEQ ID NO: 553 - DNA, 19 bp, Homo sapiens
  Cdk6 ribozyme binding site
catgtcgatcaagacttga

SEQ ID NO: 554 - DNA, 19 bp, Homo sapiens
  Cdk6 ribozyme binding site
atcaagacttgaccactta

SEQ ID NO: 555 - DNA, 19 bp, Homo sapiens
  Cdk6 ribozyme binding site
ttgaccacttacttggata

SEQ ID NO: 556 - DNA, 19 bp, Homo sapiens
  Cdk6 ribozyme binding site
tgaccacttacttggataa

SEQ ID NO: 557 - DNA, 19 bp, Homo sapiens
  Cdk6 ribozyme binding site
ccacttacttggataaagt

SEQ ID NO: 558 - DNA, 19 bp, Homo sapiens
  Cdk6 ribozyme binding site
tacttggataaagttccag

SEQ ID NO: 559 - DNA, 19 bp, Homo sapiens
  Cdk6 ribozyme binding site
ggataaagttccagagcct

SEQ ID NO: 560 - DNA, 19 bp, Homo sapiens
  Cdk6 ribozyme binding site
gataaagttccagagcctg

SEQ ID NO: 561 - DNA, 19 bp, Homo sapiens
  Cdk6 ribozyme binding site
tgaaaccataaaggatatg

SEQ ID NO: 562 - DNA, 19 bp, Homo sapiens
  Cdk6 ribozyme binding site
ataaaggatatgatgtttc

SEQ ID NO: 563 - DNA, 19 bp, Homo sapiens
  Cdk6 ribozyme binding site
atatgatgtttcagcttct

SEQ ID NO: 564 - DNA, 19 bp, Homo sapiens
  Cdk6 ribozyme binding site
tatgatgtttcagcttctc

SEQ ID NO: 565 - DNA, 19 bp, Homo sapiens
  Cdk6 ribozyme binding site
atgatgtttcagcttctcc

SEQ ID NO: 566 - DNA, 19 bp, Homo sapiens
  Cdk6 ribozyme binding site
gtttcagcttctccgaggt

SEQ ID NO: 567 - DNA, 19 bp, Homo sapiens
  Cdk6 ribozyme binding site
tttcagcttctccgaggtc

SEQ ID NO: 568 - DNA, 19 bp, Homo sapiens
  Cdk6 ribozyme binding site
tcagcttctccgaggtctg

SEQ ID NO: 569 - DNA, 19 bp, Homo sapiens
  Cdk6 ribozyme binding site
ctccgaggtctggactttc

SEQ ID NO: 570 - DNA, 19 bp, Homo sapiens
  Cdk6 ribozyme binding site
gtctggactttcttcattc

SEQ ID NO: 571 - DNA, 19 bp, Homo sapiens
  Cdk6 ribozyme binding site
tctggactttcttcattca

SEQ ID NO: 572 - DNA, 19 bp, Homo sapiens
  Cdk6 ribozyme binding site
ctggactttcttcattcac

SEQ ID NO: 573 - DNA, 19 bp, Homo sapiens
  Cdk6 ribozyme binding site
ggactttcttcattcacac

SEQ ID NO: 574 - DNA, 19 bp, Homo sapiens
  Cdk6 ribozyme binding site
gactttcttcattcacacc

SEQ ID NO: 575 - DNA, 19 bp, Homo sapiens
  Cdk6 ribozyme binding site
tttcttcattcacaccgag

SEQ ID NO: 576 - DNA, 19 bp, Homo sapiens
  Cdk6 ribozyme binding site
ttcttcattcacaccgagt

SEQ ID NO: 577 - DNA, 19 bp, Homo sapiens
  Cdk6 ribozyme binding site
acaccgagtagtgcatcgc

SEQ ID NO: 578 - DNA, 19 bp, Homo sapiens
  Cdk6 ribozyme binding site
gtagtgcatcgcgatctaa

SEQ ID NO: 579 - DNA, 19 bp, Homo sapiens
  Cdk6 ribozyme binding site
catcgcgatctaaaaccac

SEQ ID NO: 580 - DNA, 19 bp, Homo sapiens
  Cdk6 ribozyme binding site
tcgcgatctaaaaccacag

SEQ ID NO: 581 - DNA, 19 bp, Homo sapiens
  Cdk6 ribozyme binding site
acagaacattctggtgacc

SEQ ID NO: 582 - DNA, 19 bp, Homo sapiens
  Cdk6 ribozyme binding site
cggacaaataaaactcgct

SEQ ID NO: 583 - DNA, 19 bp, Homo sapiens
  Cdk6 ribozyme binding site
aataaaactcgctgacttc

SEQ ID NO: 584 - DNA, 19 bp, Homo sapiens
  Cdk6 ribozyme binding site
tcgctgacttcggccttgc

SEQ ID NO: 585 - DNA, 19 bp, Homo sapiens
  Cdk6 ribozyme binding site
cgctgacttcggccttgcc

SEQ ID NO: 586 - DNA, 19 bp, Homo sapiens
  Cdk6 ribozyme binding site
cttcggccttgcccgcatc

SEQ ID NO: 587 - DNA, 19 bp, Homo sapiens
  Cdk6 ribozyme binding site
tgcccgcatctatagtttc

SEQ ID NO: 588 - DNA, 19 bp, Homo sapiens
  Cdk6 ribozyme binding site
cccgcatctatagtttcca

SEQ ID NO: 589 - DNA, 19 bp, Homo sapiens
  Cdk6 ribozyme binding site
cgcatctatagtttccaga

SEQ ID NO: 590 - DNA, 19 bp, Homo sapiens
  Cdk6 ribozyme binding site
atctatagtttccagatgg

SEQ ID NO: 591 - DNA, 19 bp, Homo sapiens
  Cdk6 ribozyme binding site
tctatagtttccagatggc

SEQ ID NO: 592 - DNA, 19 bp, Homo sapiens
  Cdk6 ribozyme binding site
ctatagtttccagatggct

SEQ ID NO: 593 - DNA, 19 bp, Homo sapiens
  Cdk6 ribozyme binding site
cagatggctctaacctcag

SEQ ID NO: 594 - DNA, 19 bp, Homo sapiens
  Cdk6 ribozyme binding site
gatggctctaacctcagtg

SEQ ID NO: 595 - DNA, 19 bp, Homo sapiens
  Cdk6 ribozyme binding site
ctctaacctcagtggtcgt

SEQ ID NO: 596 - DNA, 19 bp, Homo sapiens
  Cdk6 ribozyme binding site
ctcagtggtcgtcacgctg

SEQ ID NO: 597 - DNA, 19 bp, Homo sapiens
  Cdk6 ribozyme binding site
agtggtcgtcacgctgtgg

SEQ ID NO: 598 - DNA, 19 bp, Homo sapiens
  Cdk6 ribozyme binding site
cgctgtggtacagagcacc

SEQ ID NO: 599 - DNA, 19 bp, Homo sapiens
  Cdk6 ribozyme binding site
acccgaagtcttgctccag

SEQ ID NO: 600 - DNA, 19 bp, Homo sapiens
  Cdk6 ribozyme binding site
ccgaagtcttgctccagtc

SEQ ID NO: 601 - DNA, 19 bp, Homo sapiens
  Cdk6 ribozyme binding site
agtcttgctccagtccagc

SEQ ID NO: 602 - DNA, 19 bp, Homo sapiens
  Cdk6 ribozyme binding site
tgctccagtccagctacgc

SEQ ID NO: 603 - DNA, 19 bp, Homo sapiens
  Cdk6 ribozyme binding site
agtccagctacgccacccc

SEQ ID NO: 604 - DNA, 19 bp, Homo sapiens
  Cdk6 ribozyme binding site
cccgtggatctctggagtg

SEQ ID NO: 605 - DNA, 19 bp, Homo sapiens
  Cdk6 ribozyme binding site
cgtggatctctggagtgtt

SEQ ID NO: 606 - DNA, 19 bp, Homo sapiens
  Cdk6 ribozyme binding site
ctggagtgttggctgcata

SEQ ID NO: 607 - DNA, 19 bp, Homo sapiens
  Cdk6 ribozyme binding site
tggctgcatatttgcagaa

SEQ ID NO: 608 - DNA, 19 bp, Homo sapiens
  Cdk6 ribozyme binding site
gctgcatatttgcagaaat

SEQ ID NO: 609 - DNA, 19 bp, Homo sapiens
  Cdk6 ribozyme binding site
ctgcatatttgcagaaatg

SEQ ID NO: 610 - DNA, 19 bp, Homo sapiens
  Cdk6 ribozyme binding site
cagaaatgtttcgtagaaa

SEQ ID NO: 611 - DNA, 19 bp, Homo sapiens
  Cdk6 ribozyme binding site
agaaatgtttcgtagaaag

SEQ ID NO: 612 - DNA, 19 bp, Homo sapiens
  Cdk6 ribozyme binding site
gaaatgtttcgtagaaagc

SEQ ID NO: 613 - DNA, 19 bp, Homo sapiens
  Cdk6 ribozyme binding site
atgtttcgtagaaagcctc

SEQ ID NO: 614 - DNA, 19 bp, Homo sapiens
  Cdk6 ribozyme binding site
agaaagcctctttttcgtg

SEQ ID NO: 615 - DNA, 19 bp, Homo sapiens
  Cdk6 ribozyme binding site
aaagcctctttttcgtgga

SEQ ID NO: 616 - DNA, 19 bp, Homo sapiens
  Cdk6 ribozyme binding site
aagcctctttttcgtggaa

SEQ ID NO: 617 - DNA, 19 bp, Homo sapiens
  Cdk6 ribozyme binding site
agcctctttttcgtggaag

SEQ ID NO: 618 - DNA, 19 bp, Homo sapiens
  Cdk6 ribozyme binding site
gcctctttttcgtggaagt

SEQ ID NO: 619 - DNA, 19 bp, Homo sapiens
  Cdk6 ribozyme binding site
cctctttttcgtggaagtt

SEQ ID NO: 620 - DNA, 19 bp, Homo sapiens
  Cdk6 ribozyme binding site
cgtggaagttcagatgttg

SEQ ID NO: 621 - DNA, 19 bp, Homo sapiens
  Cdk6 ribozyme binding site
gtggaagttcagatgttga

SEQ ID NO: 622 - DNA, 19 bp, Homo sapiens
  Cdk6 ribozyme binding site
ttcagatgttgatcaacta

SEQ ID NO: 623 - DNA, 19 bp, Homo sapiens
  Cdk6 ribozyme binding site
gatgttgatcaactaggaa

SEQ ID NO: 624 - DNA, 19 bp, Homo sapiens
  Cdk6 ribozyme binding site
tgatcaactaggaaaaatc

SEQ ID NO: 625 - DNA, 19 bp, Homo sapiens
  Cdk6 ribozyme binding site
aggaaaaatcttggacgtg

SEQ ID NO: 626 - DNA, 19 bp, Homo sapiens
  Cdk6 ribozyme binding site
gaaaaatcttggacgtgat

SEQ ID NO: 627 - DNA, 19 bp, Homo sapiens
  Cdk6 ribozyme binding site
ggacgtgattggactccca

SEQ ID NO: 628 - DNA, 19 bp, Homo sapiens
  Cdk6 ribozyme binding site
gattggactcccaggagaa

SEQ ID NO: 629 - DNA, 19 bp, Homo sapiens
  Cdk6 ribozyme binding site
gactggcctagagatgttg

SEQ ID NO: 630 - DNA, 19 bp, Homo sapiens
  Cdk6 ribozyme binding site
tagagatgttgcccttccc

SEQ ID NO: 631 - DNA, 19 bp, Homo sapiens
  Cdk6 ribozyme binding site
tgttgcccttcccaggcag

SEQ ID NO: 632 - DNA, 19 bp, Homo sapiens
  Cdk6 ribozyme binding site
gttgcccttcccaggcagg

SEQ ID NO: 633 - DNA, 19 bp, Homo sapiens
  Cdk6 ribozyme binding site
aggcaggcttttcattcaa

SEQ ID NO: 634 - DNA, 19 bp, Homo sapiens
  Cdk6 ribozyme binding site
ggcaggcttttcattcaaa

SEQ ID NO: 635 - DNA, 19 bp, Homo sapiens
  Cdk6 ribozyme binding site
gcaggcttttcattcaaaa

SEQ ID NO: 636 - DNA, 19 bp, Homo sapiens
  Cdk6 ribozyme binding site
caggcttttcattcaaaat

SEQ ID NO: 637 - DNA, 19 bp, Homo sapiens
  Cdk6 ribozyme binding site
gcttttcattcaaaatctg

SEQ ID NO: 638 - DNA, 19 bp, Homo sapiens
  Cdk6 ribozyme binding site
cttttcattcaaaatctgc

SEQ ID NO: 639 - DNA, 19 bp, Homo sapiens
  Cdk6 ribozyme binding site
attcaaaatctgcccaacc

SEQ ID NO: 640 - DNA, 19 bp, Homo sapiens
  Cdk6 ribozyme binding site
ccaaccaattgagaagttt

SEQ ID NO: 641 - DNA, 19 bp, Homo sapiens
  Cdk6 ribozyme binding site
ttgagaagtttgtaacaga

SEQ ID NO: 642 - DNA, 19 bp, Homo sapiens
  Cdk6 ribozyme binding site
tgagaagtttgtaacagat

SEQ ID NO: 643 - DNA, 19 bp, Homo sapiens
  Cdk6 ribozyme binding site
gaagtttgtaacagatatc

SEQ ID NO: 644 - DNA, 19 bp, Homo sapiens
  Cdk6 ribozyme binding site
gtaacagatatcgatgaac

SEQ ID NO: 645 - DNA, 19 bp, Homo sapiens
  Cdk6 ribozyme binding site
aacagatatcgatgaacta

SEQ ID NO: 646 - DNA, 19 bp, Homo sapiens
  Cdk6 ribozyme binding site
cgatgaactaggcaaagac

SEQ ID NO: 647 - DNA, 19 bp, Homo sapiens
  Cdk6 ribozyme binding site
caaagacctacttctgaag

SEQ ID NO: 648 - DNA, 19 bp, Homo sapiens
  Cdk6 ribozyme binding site
agacctacttctgaagtgt

SEQ ID NO: 649 - DNA, 19 bp, Homo sapiens
  Cdk6 ribozyme binding site
gacctacttctgaagtgtt

SEQ ID NO: 650 - DNA, 19 bp, Homo sapiens
  Cdk6 ribozyme binding site
ctgaagtgtttgacattta

SEQ ID NO: 651 - DNA, 19 bp, Homo sapiens
  Cdk6 ribozyme binding site
tgaagtgtttgacatttaa

SEQ ID NO: 652 - DNA, 19 bp, Homo sapiens
  Cdk6 ribozyme binding site
gtttgacatttaacccagc

SEQ ID NO: 653 - DNA, 19 bp, Homo sapiens
  Cdk6 ribozyme binding site
tttgacatttaacccagcc

SEQ ID NO: 654 - DNA, 19 bp, Homo sapiens
  Cdk6 ribozyme binding site
ttgacatttaacccagcca

SEQ ID NO: 655 - DNA, 19 bp, Homo sapiens
  Cdk6 ribozyme binding site
caaaagaatatctgcctac

SEQ ID NO: 656 - DNA, 19 bp, Homo sapiens
  Cdk6 ribozyme binding site
aaagaatatctgcctacag

SEQ ID NO: 657 - DNA, 19 bp, Homo sapiens
  Cdk6 ribozyme binding site
tatctgcctacagtgccct

SEQ ID NO: 658 - DNA, 19 bp, Homo sapiens
  Cdk6 ribozyme binding site
gtgccctgtctcacccata

SEQ ID NO: 659 - DNA, 19 bp, Homo sapiens
  Cdk6 ribozyme binding site
gccctgtctcacccatact

SEQ ID NO: 660 - DNA, 19 bp, Homo sapiens
  Cdk6 ribozyme binding site
ctcacccatacttccagga

SEQ ID NO: 661 - DNA, 19 bp, Homo sapiens
  Cdk6 ribozyme binding site
acccatacttccaggacct

SEQ ID NO: 662 - DNA, 19 bp, Homo sapiens
  Cdk6 ribozyme binding site
cccatacttccaggacctg

SEQ ID NO: 663 - DNA, 19 bp, Homo sapiens
  Cdk6 ribozyme binding site
aacctggattcccacctgc

SEQ ID NO: 664 - DNA, 19 bp, Homo sapiens
  Cdk6 ribozyme binding site
acctggattcccacctgcc

SEQ ID NO: 665 - DNA, 19 bp, Homo sapiens
  Cdk6 ribozyme binding site
agaacacctcggagctgaa

SEQ ID NO: 666 - DNA, 19 bp, Homo sapiens
  Cdk7 ribozyme binding site
acgtgaagtctcgggcaaa

SEQ ID NO: 667 - DNA, 19 bp, Homo sapiens
  Cdk7 ribozyme binding site
gtgaagtctcgggcaaagc

SEQ ID NO: 668 - DNA, 19 bp, Homo sapiens
  Cdk7 ribozyme binding site
gcaaagcgttatgagaagc

SEQ ID NO: 669 - DNA, 19 bp, Homo sapiens
  Cdk7 ribozyme binding site
caaagcgttatgagaagct

SEQ ID NO: 670 - DNA, 19 bp, Homo sapiens
  Cdk7 ribozyme binding site
agctggacttccttgggga

SEQ ID NO: 671 - DNA, 19 bp, Homo sapiens
  Cdk7 ribozyme binding site
gctggacttccttggggag

SEQ ID NO: 672 - DNA, 19 bp, Homo sapiens
  Cdk7 ribozyme binding site
ggacttccttggggaggga

SEQ ID NO: 673 - DNA, 19 bp, Homo sapiens
  Cdk7 ribozyme binding site
agggacagtttgccaccgt

SEQ ID NO: 674 - DNA, 19 bp, Homo sapiens
  Cdk7 ribozyme binding site
gggacagtttgccaccgtt

SEQ ID NO: 675 - DNA, 19 bp, Homo sapiens
  Cdk7 ribozyme binding site
tgccaccgtttacaaggcc

SEQ ID NO: 676 - DNA, 19 bp, Homo sapiens
  Cdk7 ribozyme binding site
gccaccgtttacaaggcca

SEQ ID NO: 677 - DNA, 19 bp, Homo sapiens
  Cdk7 ribozyme binding site
ccaccgtttacaaggccag

SEQ ID NO: 678 - DNA, 19 bp, Homo sapiens
  Cdk7 ribozyme binding site
gccagagataagaatacca

SEQ ID NO: 679 - DNA, 19 bp, Homo sapiens
  Cdk7 ribozyme binding site
gataagaataccaaccaaa

SEQ ID NO: 680 - DNA, 19 bp, Homo sapiens
  Cdk7 ribozyme binding site
caaccaaattgtcgccatt

SEQ ID NO: 681 - DNA, 19 bp, Homo sapiens
  Cdk7 ribozyme binding site
ccaaattgtcgccattaag

SEQ ID NO: 682 - DNA, 19 bp, Homo sapiens
  Cdk7 ribozyme binding site
tgtcgccattaagaaaatc

SEQ ID NO: 683 - DNA, 19 bp, Homo sapiens
  Cdk7 ribozyme binding site
gtcgccattaagaaaatca

SEQ ID NO: 684 - DNA, 19 bp, Homo sapiens
  Cdk7 ribozyme binding site
taagaaaatcaaacttgga

SEQ ID NO: 685 - DNA, 19 bp, Homo sapiens
  Cdk7 ribozyme binding site
aatcaaacttggacataga

SEQ ID NO: 686 - DNA, 19 bp, Homo sapiens
  Cdk7 ribozyme binding site
cttggacatagatcagaag

SEQ ID NO: 687 - DNA, 19 bp, Homo sapiens
  Cdk7 ribozyme binding site
gacatagatcagaagctaa

SEQ ID NO: 688 - DNA, 19 bp, Homo sapiens
  Cdk7 ribozyme binding site
tcagaagctaaagatggta

SEQ ID NO: 689 - DNA, 19 bp, Homo sapiens
  Cdk7 ribozyme binding site
aaagatggtataaatagaa

SEQ ID NO: 690 - DNA, 19 bp, Homo sapiens
  Cdk7 ribozyme binding site
agatggtataaatagaacc

SEQ ID NO: 691 - DNA, 19 bp, Homo sapiens
  Cdk7 ribozyme binding site
ggtataaatagaaccgcct

SEQ ID NO: 692 - DNA, 19 bp, Homo sapiens
  Cdk7 ribozyme binding site
gaaccgccttaagagagat

SEQ ID NO: 693 - DNA, 19 bp, Homo sapiens
  Cdk7 ribozyme binding site
aaccgccttaagagagata

SEQ ID NO: 694 - DNA, 19 bp, Homo sapiens
  Cdk7 ribozyme binding site
aagagagataaaattatta

SEQ ID NO: 695 - DNA, 19 bp, Homo sapiens
  Cdk7 ribozyme binding site
agataaaattattacagga

SEQ ID NO: 696 - DNA, 19 bp, Homo sapiens
  Cdk7 ribozyme binding site
gataaaattattacaggag

SEQ ID NO: 697 - DNA, 19 bp, Homo sapiens
  Cdk7 ribozyme binding site
taaaattattacaggagct

SEQ ID NO: 698 - DNA, 19 bp, Homo sapiens
  Cdk7 ribozyme binding site
aaaattattacaggagcta

SEQ ID NO: 699 - DNA, 19 bp, Homo sapiens
  Cdk7 ribozyme binding site
acaggagctaagtcatcca

SEQ ID NO: 700 - DNA, 19 bp, Homo sapiens
  Cdk7 ribozyme binding site
gagctaagtcatccaaata

SEQ ID NO: 701 - DNA, 19 bp, Homo sapiens
  Cdk7 ribozyme binding site
ctaagtcatccaaatataa

SEQ ID NO: 702 - DNA, 19 bp, Homo sapiens
  Cdk7 ribozyme binding site
catccaaatataattggtc

SEQ ID NO: 703 - DNA, 19 bp, Homo sapiens
  Cdk7 ribozyme binding site
tccaaatataattggtctc

SEQ ID NO: 704 - DNA, 19 bp, Homo sapiens
  Cdk7 ribozyme binding site
aaatataattggtctcctt

SEQ ID NO: 705 - DNA, 19 bp, Homo sapiens
  Cdk7 ribozyme binding site
ataattggtctccttgatg

SEQ ID NO: 706 - DNA, 19 bp, Homo sapiens
  Cdk7 ribozyme binding site
aattggtctccttgatgct

SEQ ID NO: 707 - DNA, 19 bp, Homo sapiens
  Cdk7 ribozyme binding site
tggtctccttgatgctttt

SEQ ID NO: 708 - DNA, 19 bp, Homo sapiens
  Cdk7 ribozyme binding site
cttgatgcttttggacata

SEQ ID NO: 709 - DNA, 19 bp, Homo sapiens
  Cdk7 ribozyme binding site
ttgatgcttttggacataa

SEQ ID NO: 710 - DNA, 19 bp, Homo sapiens
  Cdk7 ribozyme binding site
tgatgcttttggacataaa

SEQ ID NO: 711 - DNA, 19 bp, Homo sapiens
  Cdk7 ribozyme binding site
tttggacataaatctaata

SEQ ID NO: 712 - DNA, 19 bp, Homo sapiens
  Cdk7 ribozyme binding site
gacataaatctaatattag

SEQ ID NO: 713 - DNA, 19 bp, Homo sapiens
  Cdk7 ribozyme binding site
cataaatctaatattagcc

SEQ ID NO: 714 - DNA, 19 bp, Homo sapiens
  Cdk7 ribozyme binding site
aaatctaatattagccttg

SEQ ID NO: 715 - DNA, 19 bp, Homo sapiens
  Cdk7 ribozyme binding site
atctaatattagccttgtc

SEQ ID NO: 716 - DNA, 19 bp, Homo sapiens
  Cdk7 ribozyme binding site
tctaatattagccttgtct

SEQ ID NO: 717 - DNA, 19 bp, Homo sapiens
  Cdk7 ribozyme binding site
tattagccttgtctttgat

SEQ ID NO: 718 - DNA, 19 bp, Homo sapiens
  Cdk7 ribozyme binding site
tagccttgtctttgatttt

SEQ ID NO: 719 - DNA, 19 bp, Homo sapiens
  Cdk7 ribozyme binding site
gccttgtctttgattttat

SEQ ID NO: 720 - DNA, 19 bp, Homo sapiens
  Cdk7 ribozyme binding site
ccttgtctttgattttatg

SEQ ID NO: 721 - DNA, 19 bp, Homo sapiens
  Cdk7 ribozyme binding site
gtctttgattttatggaaa

SEQ ID NO: 722 - DNA, 19 bp, Homo sapiens
  Cdk7 ribozyme binding site
tctttgattttatggaaac

SEQ ID NO: 723 - DNA, 19 bp, Homo sapiens
  Cdk7 ribozyme binding site
ctttgattttatggaaact

SEQ ID NO: 724 - DNA, 19 bp, Homo sapiens
  Cdk7 ribozyme binding site
tttgattttatggaaactg

SEQ ID NO: 725 - DNA, 19 bp, Homo sapiens
  Cdk7 ribozyme binding site
gaaactgatctagaggtta

SEQ ID NO: 726 - DNA, 19 bp, Homo sapiens
  Cdk7 ribozyme binding site
aactgatctagaggttata

SEQ ID NO: 727 - DNA, 19 bp, Homo sapiens
  Cdk7 ribozyme binding site
tctagaggttataataaag

SEQ ID NO: 728 - DNA, 19 bp, Homo sapiens
  Cdk7 ribozyme binding site
ctagaggttataataaagg

SEQ ID NO: 729 - DNA, 19 bp, Homo sapiens
  Cdk7 ribozyme binding site
agaggttataataaaggat

SEQ ID NO: 730 - DNA, 19 bp, Homo sapiens
  Cdk7 ribozyme binding site
ggttataataaaggataat

SEQ ID NO: 731 - DNA, 19 bp, Homo sapiens
  Cdk7 ribozyme binding site
ataaaggataatagtcttg

SEQ ID NO: 732 - DNA, 19 bp, Homo sapiens
  Cdk7 ribozyme binding site
aaggataatagtcttgtgc

SEQ ID NO: 733 - DNA, 19 bp, Homo sapiens
  Cdk7 ribozyme binding site
gataatagtcttgtgctga

SEQ ID NO: 734 - DNA, 19 bp, Homo sapiens
  Cdk7 ribozyme binding site
taatagtcttgtgctgaca

SEQ ID NO: 735 - DNA, 19 bp, Homo sapiens
  Cdk7 ribozyme binding site
tgacaccatcacacatcaa

SEQ ID NO: 736 - DNA, 19 bp, Homo sapiens
  Cdk7 ribozyme binding site
atcacacatcaaagcctac

SEQ ID NO: 737 - DNA, 19 bp, Homo sapiens
  Cdk7 ribozyme binding site
tcaaagcctacatgttgat

SEQ ID NO: 738 - DNA, 19 bp, Homo sapiens
  Cdk7 ribozyme binding site
cctacatgttgatgactct

SEQ ID NO: 739 - DNA, 19 bp, Homo sapiens
  Cdk7 ribozyme binding site
ttgatgactcttcaaggat

SEQ ID NO: 740 - DNA, 19 bp, Homo sapiens
  Cdk7 ribozyme binding site
gatgactcttcaaggatta

SEQ ID NO: 741 - DNA, 19 bp, Homo sapiens
  Cdk7 ribozyme binding site
atgactcttcaaggattag

SEQ ID NO: 742 - DNA, 19 bp, Homo sapiens
  Cdk7 ribozyme binding site
ttcaaggattagaatattt

SEQ ID NO: 743 - DNA, 19 bp, Homo sapiens
  Cdk7 ribozyme binding site
tcaaggattagaatattta

SEQ ID NO: 744 - DNA, 19 bp, Homo sapiens
  Cdk7 ribozyme binding site
gattagaatatttacatca

SEQ ID NO: 745 - DNA, 19 bp, Homo sapiens
  Cdk7 ribozyme binding site
ttagaatatttacatcaac

SEQ ID NO: 746 - DNA, 19 bp, Homo sapiens
  Cdk7 ribozyme binding site
tagaatatttacatcaaca

SEQ ID NO: 747 - DNA, 19 bp, Homo sapiens
  Cdk7 ribozyme binding site
agaatatttacatcaacat

SEQ ID NO: 748 - DNA, 19 bp, Homo sapiens
  Cdk7 ribozyme binding site
tatttacatcaacattgga

SEQ ID NO: 749 - DNA, 19 bp, Homo sapiens
  Cdk7 ribozyme binding site
catcaacattggatcctac

SEQ ID NO: 750 - DNA, 19 bp, Homo sapiens
  Cdk7 ribozyme binding site
acattggatcctacatagg

SEQ ID NO: 751 - DNA, 19 bp, Homo sapiens
  Cdk7 ribozyme binding site
ttggatcctacatagggat

SEQ ID NO: 752 - DNA, 19 bp, Homo sapiens
  Cdk7 ribozyme binding site
atcctacatagggatctga

SEQ ID NO: 753 - DNA, 19 bp, Homo sapiens
  Cdk7 ribozyme binding site
catagggatctgaaaccaa

SEQ ID NO: 754 - DNA, 19 bp, Homo sapiens
  Cdk7 ribozyme binding site
caaacaacttgttgctaga

SEQ ID NO: 755 - DNA, 19 bp, Homo sapiens
  Cdk7 ribozyme binding site
acaacttgttgctagatga

SEQ ID NO: 756 - DNA, 19 bp, Homo sapiens
  Cdk7 ribozyme binding site
cttgttgctagatgaaaat

SEQ ID NO: 757 - DNA, 19 bp, Homo sapiens
  Cdk7 ribozyme binding site
aaatggagttctaaaactg

SEQ ID NO: 758 - DNA, 19 bp, Homo sapiens
  Cdk7 ribozyme binding site
aatggagttctaaaactgg

SEQ ID NO: 759 - DNA, 19 bp, Homo sapiens
  Cdk7 ribozyme binding site
tggagttctaaaactggca

SEQ ID NO: 760 - DNA, 19 bp, Homo sapiens
  Cdk7 ribozyme binding site
ctggcagattttggcctgg

SEQ ID NO: 761 - DNA, 19 bp, Homo sapiens
  Cdk7 ribozyme binding site
tggcagattttggcctggc

SEQ ID NO: 762 - DNA, 19 bp, Homo sapiens
  Cdk7 ribozyme binding site
ggcagattttggcctggcc

SEQ ID NO: 763 - DNA, 19 bp, Homo sapiens
  Cdk7 ribozyme binding site
tggccaaatcttttgggag

SEQ ID NO: 764 - DNA, 19 bp, Homo sapiens
  Cdk7 ribozyme binding site
gccaaatcttttgggagcc

SEQ ID NO: 765 - DNA, 19 bp, Homo sapiens
  Cdk7 ribozyme binding site
ccaaatcttttgggagccc

SEQ ID NO: 766 - DNA, 19 bp, Homo sapiens
  Cdk7 ribozyme binding site
caaatcttttgggagcccc

SEQ ID NO: 767 - DNA, 19 bp, Homo sapiens
  Cdk7 ribozyme binding site
agccccaatagagcttata

SEQ ID NO: 768 - DNA, 19 bp, Homo sapiens
  Cdk7 ribozyme binding site
aatagagcttatacacatc

SEQ ID NO: 769 - DNA, 19 bp, Homo sapiens
  Cdk7 ribozyme binding site
atagagcttatacacatca

SEQ ID NO: 770 - DNA, 19 bp, Homo sapiens
  Cdk7 ribozyme binding site
agagcttatacacatcagg

SEQ ID NO: 771 - DNA, 19 bp, Homo sapiens
  Cdk7 ribozyme binding site
tatacacatcaggttgtaa

SEQ ID NO: 772 - DNA, 19 bp, Homo sapiens
  Cdk7 ribozyme binding site
acatcaggttgtaaccagg

SEQ ID NO: 773 - DNA, 19 bp, Homo sapiens
  Cdk7 ribozyme binding site
tcaggttgtaaccaggtgg

SEQ ID NO: 774 - DNA, 19 bp, Homo sapiens
  Cdk7 ribozyme binding site
ccaggtggtatcgggcccc

SEQ ID NO: 775 - DNA, 19 bp, Homo sapiens
  Cdk7 ribozyme binding site
aggtggtatcgggcccccg

SEQ ID NO: 776 - DNA, 19 bp, Homo sapiens
  Cdk7 ribozyme binding site
cccccgagttactatttgg

SEQ ID NO: 777 - DNA, 19 bp, Homo sapiens
  Cdk7 ribozyme binding site
ccccgagttactatttgga

SEQ ID NO: 778 - DNA, 19 bp, Homo sapiens
  Cdk7 ribozyme binding site
cgagttactatttggagct

SEQ ID NO: 779 - DNA, 19 bp, Homo sapiens
  Cdk7 ribozyme binding site
agttactatttggagctag

SEQ ID NO: 780 - DNA, 19 bp, Homo sapiens
  Cdk7 ribozyme binding site
gttactatttggagctagg

SEQ ID NO: 781 - DNA, 19 bp, Homo sapiens
  Cdk7 ribozyme binding site
tttggagctaggatgtatg

SEQ ID NO: 782 - DNA, 19 bp, Homo sapiens
  Cdk7 ribozyme binding site
ctaggatgtatggtgtagg

SEQ ID NO: 783 - DNA, 19 bp, Homo sapiens
  Cdk7 ribozyme binding site
gtatggtgtaggtgtggac

SEQ ID NO: 784 - DNA, 19 bp, Homo sapiens
  Cdk7 ribozyme binding site
gtgggctgttggctgtata

SEQ ID NO: 785 - DNA, 19 bp, Homo sapiens
  Cdk7 ribozyme binding site
gttggctgtatattagcag

SEQ ID NO: 786 - DNA, 19 bp, Homo sapiens
  Cdk7 ribozyme binding site
tggctgtatattagcagag

SEQ ID NO: 787 - DNA, 19 bp, Homo sapiens
  Cdk7 ribozyme binding site
gctgtatattagcagagtt

SEQ ID NO: 788 - DNA, 19 bp, Homo sapiens
  Cdk7 ribozyme binding site
ctgtatattagcagagtta

SEQ ID NO: 789 - DNA, 19 bp, Homo sapiens
  Cdk7 ribozyme binding site
tagcagagttacttctaag

SEQ ID NO: 790 - DNA, 19 bp, Homo sapiens
  Cdk7 ribozyme binding site
agcagagttacttctaagg

SEQ ID NO: 791 - DNA, 19 bp, Homo sapiens
  Cdk7 ribozyme binding site
agagttacttctaagggtt

SEQ ID NO: 792 - DNA, 19 bp, Homo sapiens
  Cdk7 ribozyme binding site
gagttacttctaagggttc

SEQ ID NO: 793 - DNA, 19 bp, Homo sapiens
  Cdk7 ribozyme binding site
gttacttctaagggttcct

SEQ ID NO: 794 - DNA, 19 bp, Homo sapiens
  Cdk7 ribozyme binding site
tctaagggttccttttttg

SEQ ID NO: 795 - DNA, 19 bp, Homo sapiens
  Cdk7 ribozyme binding site
ctaagggttccttttttgc

SEQ ID NO: 796 - DNA, 19 bp, Homo sapiens
  Cdk7 ribozyme binding site
agggttccttttttgccag

SEQ ID NO: 797 - DNA, 19 bp, Homo sapiens
  Cdk7 ribozyme binding site
gggttccttttttgccagg

SEQ ID NO: 798 - DNA, 19 bp, Homo sapiens
  Cdk7 ribozyme binding site
ggttccttttttgccagga

SEQ ID NO: 799 - DNA, 19 bp, Homo sapiens
  Cdk7 ribozyme binding site
gttccttttttgccaggag

SEQ ID NO: 800 - DNA, 19 bp, Homo sapiens
  Cdk7 ribozyme binding site
ttccttttttgccaggaga

SEQ ID NO: 801 - DNA, 19 bp, Homo sapiens
  Cdk7 ribozyme binding site
ccaggagattcagaccttg

SEQ ID NO: 802 - DNA, 19 bp, Homo sapiens
  Cdk7 ribozyme binding site
caggagattcagaccttga

SEQ ID NO: 803 - DNA, 19 bp, Homo sapiens
  Cdk7 ribozyme binding site
ttcagaccttgatcagcta

SEQ ID NO: 804 - DNA, 19 bp, Homo sapiens
  Cdk7 ribozyme binding site
gaccttgatcagctaacaa

SEQ ID NO: 805 - DNA, 19 bp, Homo sapiens
  Cdk7 ribozyme binding site
tgatcagctaacaagaata

SEQ ID NO: 806 - DNA, 19 bp, Homo sapiens
  Cdk7 ribozyme binding site
aacaagaatatttgaaact

SEQ ID NO: 807 - DNA, 19 bp, Homo sapiens
  Cdk7 ribozyme binding site
caagaatatttgaaacttt

SEQ ID NO: 808 - DNA, 19 bp, Homo sapiens
  Cdk7 ribozyme binding site
aagaatatttgaaactttg

SEQ ID NO: 809 - DNA, 19 bp, Homo sapiens
  Cdk7 ribozyme binding site
tttgaaactttgggcacac

SEQ ID NO: 810 - DNA, 19 bp, Homo sapiens
  Cdk7 ribozyme binding site
ttgaaactttgggcacacc

SEQ ID NO: 811 - DNA, 19 bp, Homo sapiens
  Cdk7 ribozyme binding site
gacatgtgtagtcttccag

SEQ ID NO: 812 - DNA, 19 bp, Homo sapiens
  Cdk7 ribozyme binding site
atgtgtagtcttccagatt

SEQ ID NO: 813 - DNA, 19 bp, Homo sapiens
  Cdk7 ribozyme binding site
gtgtagtcttccagattat

SEQ ID NO: 814 - DNA, 19 bp, Homo sapiens
  Cdk7 ribozyme binding site
tgtagtcttccagattatg

SEQ ID NO: 815 - DNA, 19 bp, Homo sapiens
  Cdk7 ribozyme binding site
cttccagattatgtgacat

SEQ ID NO: 816 - DNA, 19 bp, Homo sapiens
  Cdk7 ribozyme binding site
ttccagattatgtgacatt

SEQ ID NO: 817 - DNA, 19 bp, Homo sapiens
  Cdk7 ribozyme binding site
atgtgacatttaagagttt

SEQ ID NO: 818 - DNA, 19 bp, Homo sapiens
  Cdk7 ribozyme binding site
tgtgacatttaagagtttc

SEQ ID NO: 819 - DNA, 19 bp, Homo sapiens
  Cdk7 ribozyme binding site
gtgacatttaagagtttcc

SEQ ID NO: 820 - DNA, 19 bp, Homo sapiens
  Cdk7 ribozyme binding site
tttaagagtttccctggaa

SEQ ID NO: 821 - DNA, 19 bp, Homo sapiens
  Cdk7 ribozyme binding site
ttaagagtttccctggaat

SEQ ID NO: 822 - DNA, 19 bp, Homo sapiens
  Cdk7 ribozyme binding site
taagagtttccctggaata

SEQ ID NO: 823 - DNA, 19 bp, Homo sapiens
  Cdk7 ribozyme binding site
ccctggaatacctttgcat

SEQ ID NO: 824 - DNA, 19 bp, Homo sapiens
  Cdk7 ribozyme binding site
ggaatacctttgcatcaca

SEQ ID NO: 825 - DNA, 19 bp, Homo sapiens
  Cdk7 ribozyme binding site
gaatacctttgcatcacat

SEQ ID NO: 826 - DNA, 19 bp, Homo sapiens
  Cdk7 ribozyme binding site
cctttgcatcacatcttca

SEQ ID NO: 827 - DNA, 19 bp, Homo sapiens
  Cdk7 ribozyme binding site
gcatcacatcttcagtgca

SEQ ID NO: 828 - DNA, 19 bp, Homo sapiens
  Cdk7 ribozyme binding site
atcacatcttcagtgcagc

SEQ ID NO: 829 - DNA, 19 bp, Homo sapiens
  Cdk7 ribozyme binding site
tcacatcttcagtgcagca

SEQ ID NO: 830 - DNA, 19 bp, Homo sapiens
  Cdk7 ribozyme binding site
gagacgacttactagatct

SEQ ID NO: 831 - DNA, 19 bp, Homo sapiens
  Cdk7 ribozyme binding site
agacgacttactagatctc

SEQ ID NO: 832 - DNA, 19 bp, Homo sapiens
  Cdk7 ribozyme binding site
cgacttactagatctcata

SEQ ID NO: 833 - DNA, 19 bp, Homo sapiens
  Cdk7 ribozyme binding site
ttactagatctcatacaag

SEQ ID NO: 834 - DNA, 19 bp, Homo sapiens
  Cdk7 ribozyme binding site
actagatctcatacaaggc

SEQ ID NO: 835 - DNA, 19 bp, Homo sapiens
  Cdk7 ribozyme binding site
agatctcatacaaggctta

SEQ ID NO: 836 - DNA, 19 bp, Homo sapiens
  Cdk7 ribozyme binding site
tacaaggcttattcttatt

SEQ ID NO: 837 - DNA, 19 bp, Homo sapiens
  Cdk7 ribozyme binding site
acaaggcttattcttattt

SEQ ID NO: 838 - DNA, 19 bp, Homo sapiens
  Cdk7 ribozyme binding site
aaggcttattcttatttaa

SEQ ID NO: 839 - DNA, 19 bp, Homo sapiens
  Cdk7 ribozyme binding site
gcttattcttatttaatcc

SEQ ID NO: 840 - DNA, 19 bp, Homo sapiens
  Cdk7 ribozyme binding site
cttattcttatttaatcca

SEQ ID NO: 841 - DNA, 19 bp, Homo sapiens
  Cdk7 ribozyme binding site
tattcttatttaatccatg

SEQ ID NO: 842 - DNA, 19 bp, Homo sapiens
  Cdk7 ribozyme binding site
attcttatttaatccatgt

SEQ ID NO: 843 - DNA, 19 bp, Homo sapiens
  Cdk7 ribozyme binding site
ttcttatttaatccatgtg

SEQ ID NO: 844 - DNA, 19 bp, Homo sapiens
  Cdk7 ribozyme binding site
ttatttaatccatgtgctc

SEQ ID NO: 845 - DNA, 19 bp, Homo sapiens
  Cdk7 ribozyme binding site
ccatgtgctcgaattacgg

SEQ ID NO: 846 - DNA, 19 bp, Homo sapiens
  Cdk7 ribozyme binding site
tgctcgaattacggccaca

SEQ ID NO: 847 - DNA, 19 bp, Homo sapiens
  Cdk7 ribozyme binding site
gctcgaattacggccacac

SEQ ID NO: 848 - DNA, 19 bp, Homo sapiens
  Cdk7 ribozyme binding site
aaatgaagtatttcagtaa

SEQ ID NO: 849 - DNA, 19 bp, Homo sapiens
  Cdk7 ribozyme binding site
atgaagtatttcagtaatc

SEQ ID NO: 850 - DNA, 19 bp, Homo sapiens
  Cdk7 ribozyme binding site
tgaagtatttcagtaatcg

SEQ ID NO: 851 - DNA, 19 bp, Homo sapiens
  Cdk7 ribozyme binding site
gaagtatttcagtaatcgg

SEQ ID NO: 852 - DNA, 19 bp, Homo sapiens
  Cdk7 ribozyme binding site
tatttcagtaatcggccag

SEQ ID NO: 853 - DNA, 19 bp, Homo sapiens
  Cdk7 ribozyme binding site
ttcagtaatcggccagggc

SEQ ID NO: 854 - DNA, 19 bp, Homo sapiens
  Cdk7 ribozyme binding site
cctggatgtcagctgccaa

SEQ ID NO: 855 - DNA, 19 bp, Homo sapiens
  Cdk7 ribozyme binding site
ccaaactgtccagtggaaa

SEQ ID NO: 856 - DNA, 19 bp, Homo sapiens
  Cdk7 ribozyme binding site
tggaaaccttaaaggagca

SEQ ID NO: 857 - DNA, 19 bp, Homo sapiens
  Cdk7 ribozyme binding site
ggaaaccttaaaggagcaa

SEQ ID NO: 858 - DNA, 19 bp, Homo sapiens
  Cdk7 ribozyme binding site
aggagcaatcaaatccagc

SEQ ID NO: 859 - DNA, 19 bp, Homo sapiens
  Cdk7 ribozyme binding site
caatcaaatccagctttgg

SEQ ID NO: 860 - DNA, 19 bp, Homo sapiens
  Cdk7 ribozyme binding site
aatccagctttggcaataa

SEQ ID NO: 861 - DNA, 19 bp, Homo sapiens
  Cdk7 ribozyme binding site
atccagctttggcaataaa

SEQ ID NO: 862 - DNA, 19 bp, Homo sapiens
  Cdk7 ribozyme binding site
tttggcaataaaaaggaaa

SEQ ID NO: 863 - DNA, 19 bp, Homo sapiens
  Cdk7 ribozyme binding site
cagaggccttagaacaagg

SEQ ID NO: 864 - DNA, 19 bp, Homo sapiens
  Cdk7 ribozyme binding site
agaggccttagaacaagga

SEQ ID NO: 865 - DNA, 19 bp, Homo sapiens
  Cdk7 ribozyme binding site
aaggaggattgcccaagaa

SEQ ID NO: 866 - DNA, 19 bp, Homo sapiens
  Cdk7 ribozyme binding site
caagaaactaattttttaa

SEQ ID NO: 867 - DNA, 19 bp, Homo sapiens
  Cdk8 ribozyme binding site
actatgactttaaagtgaa

SEQ ID NO: 868 - DNA, 19 bp, Homo sapiens
  Cdk8 ribozyme binding site
ctatgactttaaagtgaag

SEQ ID NO: 869 - DNA, 19 bp, Homo sapiens
  Cdk8 ribozyme binding site
tatgactttaaagtgaagc

SEQ ID NO: 870 - DNA, 19 bp, Homo sapiens
  Cdk8 ribozyme binding site
ggagcgggtcgaggacctg

SEQ ID NO: 871 - DNA, 19 bp, Homo sapiens
  Cdk8 ribozyme binding site
aggacctgtttgaatacga

SEQ ID NO: 872 - DNA, 19 bp, Homo sapiens
  Cdk8 ribozyme binding site
ggacctgtttgaatacgag

SEQ ID NO: 873 - DNA, 19 bp, Homo sapiens
  Cdk8 ribozyme binding site
tgtttgaatacgagggctg

SEQ ID NO: 874 - DNA, 19 bp, Homo sapiens
  Cdk8 ribozyme binding site
ctgcaaagttggccgaggc

SEQ ID NO: 875 - DNA, 19 bp, Homo sapiens
  Cdk8 ribozyme binding site
cgaggcacttatggtcacg

SEQ ID NO: 876 - DNA, 19 bp, Homo sapiens
  Cdk8 ribozyme binding site
gaggcacttatggtcacgt

SEQ ID NO: 877 - DNA, 19 bp, Homo sapiens
  Cdk8 ribozyme binding site
acttatggtcacgtctaca

SEQ ID NO: 878 - DNA, 19 bp, Homo sapiens
  Cdk8 ribozyme binding site
tggtcacgtctacaaagcc

SEQ ID NO: 879 - DNA, 19 bp, Homo sapiens
  Cdk8 ribozyme binding site
gtcacgtctacaaagccaa

SEQ ID NO: 880 - DNA, 19 bp, Homo sapiens
  Cdk8 ribozyme binding site
aaggatgataaagactatg

SEQ ID NO: 881 - DNA, 19 bp, Homo sapiens
  Cdk8 ribozyme binding site
ataaagactatgctttaaa

SEQ ID NO: 882 - DNA, 19 bp, Homo sapiens
  Cdk8 ribozyme binding site
gactatgctttaaaacaaa

SEQ ID NO: 883 - DNA, 19 bp, Homo sapiens
  Cdk8 ribozyme binding site
actatgctttaaaacaaat

SEQ ID NO: 884 - DNA, 19 bp, Homo sapiens
  Cdk8 ribozyme binding site
ctatgctttaaaacaaata

SEQ ID NO: 885 - DNA, 19 bp, Homo sapiens
  Cdk8 ribozyme binding site
aaaacaaatagaaggaact

SEQ ID NO: 886 - DNA, 19 bp, Homo sapiens
  Cdk8 ribozyme binding site
aactgggatctctatgtcg

SEQ ID NO: 887 - DNA, 19 bp, Homo sapiens
  Cdk8 ribozyme binding site
ctgggatctctatgtcggc

SEQ ID NO: 888 - DNA, 19 bp, Homo sapiens
  Cdk8 ribozyme binding site
gggatctctatgtcggcat

SEQ ID NO: 889 - DNA, 19 bp, Homo sapiens
  Cdk8 ribozyme binding site
tctctatgtcggcatgtag

SEQ ID NO: 890 - DNA, 19 bp, Homo sapiens
  Cdk8 ribozyme binding site
tcggcatgtagagaaatag

SEQ ID NO: 891 - DNA, 19 bp, Homo sapiens
  Cdk8 ribozyme binding site
tagagaaatagcattactt

SEQ ID NO: 892 - DNA, 19 bp, Homo sapiens
  Cdk8 ribozyme binding site
aaatagcattacttcgaga

SEQ ID NO: 893 - DNA, 19 bp, Homo sapiens
  Cdk8 ribozyme binding site
aatagcattacttcgagag

SEQ ID NO: 894 - DNA, 19 bp, Homo sapiens
  Cdk8 ribozyme binding site
agcattacttcgagagctt

SEQ ID NO: 895 - DNA, 19 bp, Homo sapiens
  Cdk8 ribozyme binding site
gcattacttcgagagctta

SEQ ID NO: 896 - DNA, 19 bp, Homo sapiens
  Cdk8 ribozyme binding site
tcgagagcttaagcatcca

SEQ ID NO: 897 - DNA, 19 bp, Homo sapiens
  Cdk8 ribozyme binding site
cgagagcttaagcatccaa

SEQ ID NO: 898 - DNA, 19 bp, Homo sapiens
  Cdk8 ribozyme binding site
cttaagcatccaaacgtca

SEQ ID NO: 899 - DNA, 19 bp, Homo sapiens
  Cdk8 ribozyme binding site
tccaaacgtcatttctctt

SEQ ID NO: 900 - DNA, 19 bp, Homo sapiens
  Cdk8 ribozyme binding site
aaacgtcatttctcttcaa

SEQ ID NO: 901 - DNA, 19 bp, Homo sapiens
  Cdk8 ribozyme binding site
aacgtcatttctcttcaaa

SEQ ID NO: 902 - DNA, 19 bp, Homo sapiens
  Cdk8 ribozyme binding site
acgtcatttctcttcaaaa

SEQ ID NO: 903 - DNA, 19 bp, Homo sapiens
  Cdk8 ribozyme binding site
gtcatttctcttcaaaagg

SEQ ID NO: 904 - DNA, 19 bp, Homo sapiens
  Cdk8 ribozyme binding site
catttctcttcaaaaggtg

SEQ ID NO: 905 - DNA, 19 bp, Homo sapiens
  Cdk8 ribozyme binding site
atttctcttcaaaaggtgt

SEQ ID NO: 906 - DNA, 19 bp, Homo sapiens
  Cdk8 ribozyme binding site
aaaaggtgtttctgtctca

SEQ ID NO: 907 - DNA, 19 bp, Homo sapiens
  Cdk8 ribozyme binding site
aaaggtgtttctgtctcat

SEQ ID NO: 908 - DNA, 19 bp, Homo sapiens
  Cdk8 ribozyme binding site
aaggtgtttctgtctcatg

SEQ ID NO: 909 - DNA, 19 bp, Homo sapiens
  Cdk8 ribozyme binding site
tgtttctgtctcatgctga

SEQ ID NO: 910 - DNA, 19 bp, Homo sapiens
  Cdk8 ribozyme binding site
tttctgtctcatgctgata

SEQ ID NO: 911 - DNA, 19 bp, Homo sapiens
  Cdk8 ribozyme binding site
catgctgataggaaggtgt

SEQ ID NO: 912 - DNA, 19 bp, Homo sapiens
  Cdk8 ribozyme binding site
ggtgtggcttctgtttgac

SEQ ID NO: 913 - DNA, 19 bp, Homo sapiens
  Cdk8 ribozyme binding site
gtgtggcttctgtttgact

SEQ ID NO: 914 - DNA, 19 bp, Homo sapiens
  Cdk8 ribozyme binding site
ggcttctgtttgactatgc

SEQ ID NO: 915 - DNA, 19 bp, Homo sapiens
  Cdk8 ribozyme binding site
gcttctgtttgactatgct

SEQ ID NO: 916 - DNA, 19 bp, Homo sapiens
  Cdk8 ribozyme binding site
tgtttgactatgctgaaca

SEQ ID NO: 917 - DNA, 19 bp, Homo sapiens
  Cdk8 ribozyme binding site
acatgacctctggcatata

SEQ ID NO: 918 - DNA, 19 bp, Homo sapiens
  Cdk8 ribozyme binding site
ctctggcatataatcaagt

SEQ ID NO: 919 - DNA, 19 bp, Homo sapiens
  Cdk8 ribozyme binding site
ctggcatataatcaagttt

SEQ ID NO: 920 - DNA, 19 bp, Homo sapiens
  Cdk8 ribozyme binding site
gcatataatcaagtttcac

SEQ ID NO: 921 - DNA, 19 bp, Homo sapiens
  Cdk8 ribozyme binding site
taatcaagtttcacagagc

SEQ ID NO: 922 - DNA, 19 bp, Homo sapiens
  Cdk8 ribozyme binding site
aatcaagtttcacagagct

SEQ ID NO: 923 - DNA, 19 bp, Homo sapiens
  Cdk8 ribozyme binding site
atcaagtttcacagagctt

SEQ ID NO: 924 - DNA, 19 bp, Homo sapiens
  Cdk8 ribozyme binding site
cacagagcttctaaagcaa

SEQ ID NO: 925 - DNA, 19 bp, Homo sapiens
  Cdk8 ribozyme binding site
acagagcttctaaagcaaa

SEQ ID NO: 926 - DNA, 19 bp, Homo sapiens
  Cdk8 ribozyme binding site
agagcttctaaagcaaaca

SEQ ID NO: 927 - DNA, 19 bp, Homo sapiens
  Cdk8 ribozyme binding site
gaagccagttcagttacct

SEQ ID NO: 928 - DNA, 19 bp, Homo sapiens
  Cdk8 ribozyme binding site
aagccagttcagttacctc

SEQ ID NO: 929 - DNA, 19 bp, Homo sapiens
  Cdk8 ribozyme binding site
cagttcagttacctcgggg

SEQ ID NO: 930 - DNA, 19 bp, Homo sapiens
  Cdk8 ribozyme binding site
agttcagttacctcgggga

SEQ ID NO: 931 - DNA, 19 bp, Homo sapiens
  Cdk8 ribozyme binding site
cagttacctcggggaatgg

SEQ ID NO: 932 - DNA, 19 bp, Homo sapiens
  Cdk8 ribozyme binding site
tggtgaagtcactattata

SEQ ID NO: 933 - DNA, 19 bp, Homo sapiens
  Cdk8 ribozyme binding site
gaagtcactattatatcag

SEQ ID NO: 934 - DNA, 19 bp, Homo sapiens
  Cdk8 ribozyme binding site
agtcactattatatcagat

SEQ ID NO: 935 - DNA, 19 bp, Homo sapiens
  Cdk8 ribozyme binding site
gtcactattatatcagatc

SEQ ID NO: 936 - DNA, 19 bp, Homo sapiens
  Cdk8 ribozyme binding site
cactattatatcagatcct

SEQ ID NO: 937 - DNA, 19 bp, Homo sapiens
  Cdk8 ribozyme binding site
ctattatatcagatcctag

SEQ ID NO: 938 - DNA, 19 bp, Homo sapiens
  Cdk8 ribozyme binding site
atatcagatcctagatggt

SEQ ID NO: 939 - DNA, 19 bp, Homo sapiens
  Cdk8 ribozyme binding site
tcagatcctagatggtatt

SEQ ID NO: 940 - DNA, 19 bp, Homo sapiens
  Cdk8 ribozyme binding site
ctagatggtattcactacc

SEQ ID NO: 941 - DNA, 19 bp, Homo sapiens
  Cdk8 ribozyme binding site
agatggtattcactacctg

SEQ ID NO: 942 - DNA, 19 bp, Homo sapiens
  Cdk8 ribozyme binding site
gatggtattcactacctgc

SEQ ID NO: 943 - DNA, 19 bp, Homo sapiens
  Cdk8 ribozyme binding site
gtattcactacctgcatgc

SEQ ID NO: 944 - DNA, 19 bp, Homo sapiens
  Cdk8 ribozyme binding site
ctgcatgctaactgggtgt

SEQ ID NO: 945 - DNA, 19 bp, Homo sapiens
  Cdk8 ribozyme binding site
actgggtgttgcacagaga

SEQ ID NO: 946 - DNA, 19 bp, Homo sapiens
  Cdk8 ribozyme binding site
cacagagatttgaaacctg

SEQ ID NO: 947 - DNA, 19 bp, Homo sapiens
  Cdk8 ribozyme binding site
acagagatttgaaacctgc

SEQ ID NO: 948 - DNA, 19 bp, Homo sapiens
  Cdk8 ribozyme binding site
aaacctgctaarattttag

SEQ ID NO: 949 - DNA, 19 bp, Homo sapiens
  Cdk8 ribozyme binding site
cctgctaarattttagtta

SEQ ID NO: 950 - DNA, 19 bp, Homo sapiens
  Cdk8 ribozyme binding site
tgctaatattttagttatg

SEQ ID NO: 951 - DNA, 19 bp, Homo sapiens
  Cdk8 ribozyme binding site
gctaatattttagttatgg

SEQ ID NO: 952 - DNA, 19 bp, Homo sapiens
  Cdk8 ribozyme binding site
ctaatattttagttatggg

SEQ ID NO: 953 - DNA, 19 bp, Homo sapiens
  Cdk8 ribozyme binding site
taatattttagttatgggt

SEQ ID NO: 954 - DNA, 19 bp, Homo sapiens
  Cdk8 ribozyme binding site
tattttagttatgggtgaa

SEQ ID NO: 955 - DNA, 19 bp, Homo sapiens
  Cdk8 ribozyme binding site
attttagttatgggtgaag

SEQ ID NO: 956 - DNA, 19 bp, Homo sapiens
  Cdk8 ribozyme binding site
ggtgaaggtcctgagcgag

SEQ ID NO: 957 - DNA, 19 bp, Homo sapiens
  Cdk8 ribozyme binding site
aggaagagtaaaaattgct

SEQ ID NO: 958 - DNA, 19 bp, Homo sapiens
  Cdk8 ribozyme binding site
agtaaaaattgctgacatg

SEQ ID NO: 959 - DNA, 19 bp, Homo sapiens
  Cdk8 ribozyme binding site
acatgggctttgcccgatt

SEQ ID NO: 960 - DNA, 19 bp, Homo sapiens
  Cdk8 ribozyme binding site
catgggctttgcccgatta

SEQ ID NO: 961 - DNA, 19 bp, Homo sapiens
  Cdk8 ribozyme binding site
ttgcccgattatttaattc

SEQ ID NO: 962 - DNA, 19 bp, Homo sapiens
  Cdk8 ribozyme binding site
tgcccgattatttaattca

SEQ ID NO: 963 - DNA, 19 bp, Homo sapiens
  Cdk8 ribozyme binding site
cccgattatttaattcacc

SEQ ID NO: 964 - DNA, 19 bp, Homo sapiens
  Cdk8 ribozyme binding site
ccgattatttaattcacct

SEQ ID NO: 965 - DNA, 19 bp, Homo sapiens
  Cdk8 ribozyme binding site
cgattatttaattcacctt

SEQ ID NO: 966 - DNA, 19 bp, Homo sapiens
  Cdk8 ribozyme binding site
ttatttaattcacctttga

SEQ ID NO: 967 - DNA, 19 bp, Homo sapiens
  Cdk8 ribozyme binding site
tatttaattcacctttgaa

SEQ ID NO: 968 - DNA, 19 bp, Homo sapiens
  Cdk8 ribozyme binding site
aattcacctttgaagcctt

SEQ ID NO: 969 - DNA, 19 bp, Homo sapiens
  Cdk8 ribozyme binding site
attcacctttgaagccttt

SEQ ID NO: 970 - DNA, 19 bp, Homo sapiens
  Cdk8 ribozyme binding site
ttgaagcctttagcagatt

SEQ ID NO: 971 - DNA, 19 bp, Homo sapiens
  Cdk8 ribozyme binding site
tgaagcctttagcagattt

SEQ ID NO: 972 - DNA, 19 bp, Homo sapiens
  Cdk8 ribozyme binding site
gaagcctttagcagatttg

SEQ ID NO: 973 - DNA, 19 bp, Homo sapiens
  Cdk8 ribozyme binding site
ttagcagatttggatccag

SEQ ID NO: 974 - DNA, 19 bp, Homo sapiens
  Cdk8 ribozyme binding site
tagcagatttggatccagt

SEQ ID NO: 975 - DNA, 19 bp, Homo sapiens
  Cdk8 ribozyme binding site
gatttggatccagtggttg

SEQ ID NO: 976 - DNA, 19 bp, Homo sapiens
  Cdk8 ribozyme binding site
tccagtggttgttacattc

SEQ ID NO: 977 - DNA, 19 bp, Homo sapiens
  Cdk8 ribozyme binding site
agtggttgttacattctgg

SEQ ID NO: 978 - DNA, 19 bp, Homo sapiens
  Cdk8 ribozyme binding site
gtggttgttacattctggt

SEQ ID NO: 979 - DNA, 19 bp, Homo sapiens
  Cdk8 ribozyme binding site
ttgttacattctggtaccg

SEQ ID NO: 980 - DNA, 19 bp, Homo sapiens
  Cdk8 ribozyme binding site
tgttacattctggtaccga

SEQ ID NO: 981 - DNA, 19 bp, Homo sapiens
  Cdk8 ribozyme binding site
cattctggtaccgagcccc

SEQ ID NO: 982 - DNA, 19 bp, Homo sapiens
  Cdk8 ribozyme binding site
ccctgaactacttcttgga

SEQ ID NO: 983 - DNA, 19 bp, Homo sapiens
  Cdk8 ribozyme binding site
tgaactacttcttggagca

SEQ ID NO: 984 - DNA, 19 bp, Homo sapiens
  Cdk8 ribozyme binding site
actacttcttggagcaagg

SEQ ID NO: 985 - DNA, 19 bp, Homo sapiens
  Cdk8 ribozyme binding site
gcaaggcattataccaaag

SEQ ID NO: 986 - DNA, 19 bp, Homo sapiens
  Cdk8 ribozyme binding site
caaggcattataccaaagc

SEQ ID NO: 987 - DNA, 19 bp, Homo sapiens
  Cdk8 ribozyme binding site
aggcattataccaaagcta

SEQ ID NO: 988 - DNA, 19 bp, Homo sapiens
  Cdk8 ribozyme binding site
accaaagctattgatattt

SEQ ID NO: 989 - DNA, 19 bp, Homo sapiens
  Cdk8 ribozyme binding site
caaagctattgatatttgg

SEQ ID NO: 990 - DNA, 19 bp, Homo sapiens
  Cdk8 ribozyme binding site
gctattgatatttgggcta

SEQ ID NO: 991 - DNA, 19 bp, Homo sapiens
  Cdk8 ribozyme binding site
tattgatatttgggctata

SEQ ID NO: 992 - DNA, 19 bp, Homo sapiens
  Cdk8 ribozyme binding site
attgatatttgggctatag

SEQ ID NO: 993 - DNA, 19 bp, Homo sapiens
  Cdk8 ribozyme binding site
atttgggctatagggtgta

SEQ ID NO: 994 - DNA, 19 bp, Homo sapiens
  Cdk8 ribozyme binding site
ttgggctatagggtgtata

SEQ ID NO: 995 - DNA, 19 bp, Homo sapiens
  Cdk8 ribozyme binding site
atagggtgtatatttgcag

SEQ ID NO: 996 - DNA, 19 bp, Homo sapiens
  Cdk8 ribozyme binding site
agggtgtatatttgcagaa

SEQ ID NO: 997 - DNA, 19 bp, Homo sapiens
  Cdk8 ribozyme binding site
ggtgtatatttgcagaact

SEQ ID NO: 998 - DNA, 19 bp, Homo sapiens
  Cdk8 ribozyme binding site
gtgtatatttgcagaacta

SEQ ID NO: 999 - DNA, 19 bp, Homo sapiens
  Cdk8 ribozyme binding site
tgcagaactactaacgtca

SEQ ID NO: 1000 - DNA, 19 bp, Homo sapiens
  Cdk8 ribozyme binding site
agaactactaacgtcagaa

SEQ ID NO: 1001 - DNA, 19 bp, Homo sapiens
  Cdk8 ribozyme binding site
tactaacgtcagaaccaat

SEQ ID NO: 1002 - DNA, 19 bp, Homo sapiens
  Cdk8 ribozyme binding site
agaaccaatatttcactgt

SEQ ID NO: 1003 - DNA, 19 bp, Homo sapiens
  Cdk8 ribozyme binding site
aaccaatatttcactgtcg

SEQ ID NO: 1004 - DNA, 19 bp, Homo sapiens
  Cdk8 ribozyme binding site
accaatatttcactgtcga

SEQ ID NO: 1005 - DNA, 19 bp, Homo sapiens
  Cdk8 ribozyme binding site
ccaatatttcactgtcgac

SEQ ID NO: 1006 - DNA, 19 bp, Homo sapiens
  Cdk8 ribozyme binding site
tttcactgtcgacaagagg

SEQ ID NO: 1007 - DNA, 19 bp, Homo sapiens
  Cdk8 ribozyme binding site
caagaggatcaaaactagt

SEQ ID NO: 1008 - DNA, 19 bp, Homo sapiens
  Cdk8 ribozyme binding site
atcaaaactagtaatcctt

SEQ ID NO: 1009 - DNA, 19 bp, Homo sapiens
  Cdk8 ribozyme binding site
aaaactagtaatccttatc

SEQ ID NO: 1010 - DNA, 19 bp, Homo sapiens
  Cdk8 ribozyme binding site
actagtaatccttatcacc

SEQ ID NO: 1011 - DNA, 19 bp, Homo sapiens
  Cdk8 ribozyme binding site
agtaatccttatcaccatg

SEQ ID NO: 1012 - DNA, 19 bp, Homo sapiens
  Cdk8 ribozyme binding site
gtaatccttatcaccatga

SEQ ID NO: 1013 - DNA, 19 bp, Homo sapiens
  Cdk8 ribozyme binding site
aatccttatcaccatgacc

SEQ ID NO: 1014 - DNA, 19 bp, Homo sapiens
  Cdk8 ribozyme binding site
ggacagaatattcaatgta

SEQ ID NO: 1015 - DNA, 19 bp, Homo sapiens
  Cdk8 ribozyme binding site
acagaatattcaatgtaat

SEQ ID NO: 1016 - DNA, 19 bp, Homo sapiens
  Cdk8 ribozyme binding site
cagaatattcaatgtaatg

SEQ ID NO: 1017 - DNA, 19 bp, Homo sapiens
  Cdk8 ribozyme binding site
attcaatgtaatgggattt

SEQ ID NO: 1018 - DNA, 19 bp, Homo sapiens
  Cdk8 ribozyme binding site
taatgggatttcctgcaga

SEQ ID NO: 1019 - DNA, 19 bp, Homo sapiens
  Cdk8 ribozyme binding site
aatgggatttcctgcagat

SEQ ID NO: 1020 - DNA, 19 bp, Homo sapiens
  Cdk8 ribozyme binding site
atgggatttcctgcagata

SEQ ID NO: 1021 - DNA, 19 bp, Homo sapiens
  Cdk8 ribozyme binding site
cctgcagataaagattggg

SEQ ID NO: 1022 - DNA, 19 bp, Homo sapiens
  Cdk8 ribozyme binding site
gataaagattgggaagata

SEQ ID NO: 1023 - DNA, 19 bp, Homo sapiens
  Cdk8 ribozyme binding site
tgggaagatataaaaaaga

SEQ ID NO: 1024 - DNA, 19 bp, Homo sapiens
  Cdk8 ribozyme binding site
ggaagatataaaaaagatg

SEQ ID NO: 1025 - DNA, 19 bp, Homo sapiens
  Cdk8 ribozyme binding site
cctgaacattcaacattaa

SEQ ID NO: 1026 - DNA, 19 bp, Homo sapiens
  Cdk8 ribozyme binding site
ctgaacattcaacattaat

SEQ ID NO: 1027 - DNA, 19 bp, Homo sapiens
  Cdk8 ribozyme binding site
attcaacattaatgaaaga

SEQ ID NO: 1028 - DNA, 19 bp, Homo sapiens
  Cdk8 ribozyme binding site
ttcaacattaatgaaagat

SEQ ID NO: 1029 - DNA, 19 bp, Homo sapiens
  Cdk8 ribozyme binding site
atgaaagatttcagaagaa

SEQ ID NO: 1030 - DNA, 19 bp, Homo sapiens
  Cdk8 ribozyme binding site
tgaaagatttcagaagaaa

SEQ ID NO: 1031 - DNA, 19 bp, Homo sapiens
  Cdk8 ribozyme binding site
gaaagatttcagaagaaat

SEQ ID NO: 1032 - DNA, 19 bp, Homo sapiens
  Cdk8 ribozyme binding site
agaagaaatacgtatacca

SEQ ID NO: 1033 - DNA, 19 bp, Homo sapiens
  Cdk8 ribozyme binding site
gaaatacgtataccaactg

SEQ ID NO: 1034 - DNA, 19 bp, Homo sapiens
  Cdk8 ribozyme binding site
aatacgtataccaactgca

SEQ ID NO: 1035 - DNA, 19 bp, Homo sapiens
  Cdk8 ribozyme binding site
ctgcagccttatcaagtat

SEQ ID NO: 1036 - DNA, 19 bp, Homo sapiens
  Cdk8 ribozyme binding site
tgcagccttatcaagtata

SEQ ID NO: 1037 - DNA, 19 bp, Homo sapiens
  Cdk8 ribozyme binding site
cagccttatcaagtatatg

SEQ ID NO: 1038 - DNA, 19 bp, Homo sapiens
  Cdk8 ribozyme binding site
ttatcaagtatatggaaaa

SEQ ID NO: 1039 - DNA, 19 bp, Homo sapiens
  Cdk8 ribozyme binding site
atcaagtatatggaaaaac

SEQ ID NO: 1040 - DNA, 19 bp, Homo sapiens
  Cdk8 ribozyme binding site
gaaaaacataaagttaaac

SEQ ID NO: 1041 - DNA, 19 bp, Homo sapiens
  Cdk8 ribozyme binding site
acataaagttaaaccagat

SEQ ID NO: 1042 - DNA, 19 bp, Homo sapiens
  Cdk8 ribozyme binding site
cataaagttaaaccagata

SEQ ID NO: 1043 - DNA, 19 bp, Homo sapiens
  Cdk8 ribozyme binding site
aaaccagatagtaaagcat

SEQ ID NO: 1044 - DNA, 19 bp, Homo sapiens
  Cdk8 ribozyme binding site
ccagatagtaaagcattcc

SEQ ID NO: 1045 - DNA, 19 bp, Homo sapiens
  Cdk8 ribozyme binding site
gtaaagcattccacttgct

SEQ ID NO: 1046 - DNA, 19 bp, Homo sapiens
  Cdk8 ribozyme binding site
taaagcattccacttgctt

SEQ ID NO: 1047 - DNA, 19 bp, Homo sapiens
  Cdk8 ribozyme binding site
cattccacttgcttcagaa

SEQ ID NO: 1048 - DNA, 19 bp, Homo sapiens
  Cdk8 ribozyme binding site
ccacttgcttcagaagctg

SEQ ID NO: 1049 - DNA, 19 bp, Homo sapiens
  Cdk8 ribozyme binding site
cacttgcttcagaagctgc

SEQ ID NO: 1050 - DNA, 19 bp, Homo sapiens
  Cdk8 ribozyme binding site
gaagctgcttaccatggac

SEQ ID NO: 1051 - DNA, 19 bp, Homo sapiens
  Cdk8 ribozyme binding site
aagctgcttaccatggacc

SEQ ID NO: 1052 - DNA, 19 bp, Homo sapiens
  Cdk8 ribozyme binding site
atggaccataaagcgaatt

SEQ ID NO: 1053 - DNA, 19 bp, Homo sapiens
  Cdk8 ribozyme binding site
aaagcgaattacctcagaa

SEQ ID NO: 1054 - DNA, 19 bp, Homo sapiens
  Cdk8 ribozyme binding site
aagcgaattacctcagaac

SEQ ID NO: 1055 - DNA, 19 bp, Homo sapiens
  Cdk8 ribozyme binding site
gaattacctcagaacaggc

SEQ ID NO: 1056 - DNA, 19 bp, Homo sapiens
  Cdk8 ribozyme binding site
gaacaggctatgcaggacc

SEQ ID NO: 1057 - DNA, 19 bp, Homo sapiens
  Cdk8 ribozyme binding site
aggacccctatttcttaga

SEQ ID NO: 1058 - DNA, 19 bp, Homo sapiens
  Cdk8 ribozyme binding site
gacccctatttcttagaag

SEQ ID NO: 1059 - DNA, 19 bp, Homo sapiens
  Cdk8 ribozyme binding site
acccctatttcttagaaga

SEQ ID NO: 1060 - DNA, 19 bp, Homo sapiens
  Cdk8 ribozyme binding site
cccctatttcttagaagac

SEQ ID NO: 1061 - DNA, 19 bp, Homo sapiens
  Cdk8 ribozyme binding site
cctatttcttagaagaccc

SEQ ID NO: 1062 - DNA, 19 bp, Homo sapiens
  Cdk8 ribozyme binding site
ctatttcttagaagaccca

SEQ ID NO: 1063 - DNA, 19 bp, Homo sapiens
  Cdk8 ribozyme binding site
agacccacttcctacatca

SEQ ID NO: 1064 - DNA, 19 bp, Homo sapiens
  Cdk8 ribozyme binding site
gacccacttcctacatcag

SEQ ID NO: 1065 - DNA, 19 bp, Homo sapiens
  Cdk8 ribozyme binding site
ccacttcctacatcagacg

SEQ ID NO: 1066 - DNA, 19 bp, Homo sapiens
  Cdk8 ribozyme binding site
ttcctacatcagacgtttt

SEQ ID NO: 1067 - DNA, 19 bp, Homo sapiens
  Cdk8 ribozyme binding site
atcagacgtttttgccggt

SEQ ID NO: 1068 - DNA, 19 bp, Homo sapiens
  Cdk8 ribozyme binding site
tcagacgtttttgccggtt

SEQ ID NO: 1069 - DNA, 19 bp, Homo sapiens
  Cdk8 ribozyme binding site
cagacgtttttgccggttg

SEQ ID NO: 1070 - DNA, 19 bp, Homo sapiens
  Cdk8 ribozyme binding site
agacgtttttgccggttgt

SEQ ID NO: 1071 - DNA, 19 bp, Homo sapiens
  Cdk8 ribozyme binding site
tttgccggttgtcaaatcc

SEQ ID NO: 1072 - DNA, 19 bp, Homo sapiens
  Cdk8 ribozyme binding site
gccggttgtcaaatccctt

SEQ ID NO: 1073 - DNA, 19 bp, Homo sapiens
  Cdk8 ribozyme binding site
ttgtcaaatcccttaccca

SEQ ID NO: 1074 - DNA, 19 bp, Homo sapiens
  Cdk8 ribozyme binding site
caaatcccttacccaaaac

SEQ ID NO: 1075 - DNA, 19 bp, Homo sapiens
  Cdk8 ribozyme binding site
aaatcccttacccaaaacg

SEQ ID NO: 1076 - DNA, 19 bp, Homo sapiens
  Cdk8 ribozyme binding site
aacgagaatttttaacgga

SEQ ID NO: 1077 - DNA, 19 bp, Homo sapiens
  Cdk8 ribozyme binding site
acgagaatttttaacggaa

SEQ ID NO: 1078 - DNA, 19 bp, Homo sapiens
  Cdk8 ribozyme binding site
cgagaatttttaacggaag

SEQ ID NO: 1079 - DNA, 19 bp, Homo sapiens
  Cdk8 ribozyme binding site
gagaatttttaacggaaga

SEQ ID NO: 1080 - DNA, 19 bp, Homo sapiens
  Cdk8 ribozyme binding site
agaatttttaacggaagaa

SEQ ID NO: 1081 - DNA, 19 bp, Homo sapiens
  Cdk8 ribozyme binding site
cagggcaataaccacacta

SEQ ID NO: 1082 - DNA, 19 bp, Homo sapiens
  Cdk8 ribozyme binding site
aaccacactaatggaactg

SEQ ID NO: 1083 - DNA, 19 bp, Homo sapiens
  Cdk8 ribozyme binding site
ccagggaatcaagacagca

SEQ ID NO: 1084 - DNA, 19 bp, Homo sapiens
  Cdk8 ribozyme binding site
gacagcagtcacacacagg

SEQ ID NO: 1085 - DNA, 19 bp, Homo sapiens
  Cdk8 ribozyme binding site
gacccccgttgaagaaagt

SEQ ID NO: 1086 - DNA, 19 bp, Homo sapiens
  Cdk8 ribozyme binding site
agtgagagttgttcctcct

SEQ ID NO: 1087 - DNA, 19 bp, Homo sapiens
  Cdk8 ribozyme binding site
gagagttgttcctcctacc

SEQ ID NO: 1088 - DNA, 19 bp, Homo sapiens
  Cdk8 ribozyme binding site
agagttgttcctcctacca

SEQ ID NO: 1089 - DNA, 19 bp, Homo sapiens
  Cdk8 ribozyme binding site
gttgttcctcctaccacta

SEQ ID NO: 1090 - DNA, 19 bp, Homo sapiens
  Cdk8 ribozyme binding site
gttcctcctaccactacct

SEQ ID NO: 1091 - DNA, 19 bp, Homo sapiens
  Cdk8 ribozyme binding site
cctaccactacctcaggtg

SEQ ID NO: 1092 - DNA, 19 bp, Homo sapiens
  Cdk8 ribozyme binding site
ccactacctcaggtggact

SEQ ID NO: 1093 - DNA, 19 bp, Homo sapiens
  Cdk8 ribozyme binding site
aggtggacttatcatgacc

SEQ ID NO: 1094 - DNA, 19 bp, Homo sapiens
  Cdk8 ribozyme binding site
ggtggacttatcatgacct

SEQ ID NO: 1095 - DNA, 19 bp, Homo sapiens
  Cdk8 ribozyme binding site
tggacttatcatgacctca

SEQ ID NO: 1096 - DNA, 19 bp, Homo sapiens
  Cdk8 ribozyme binding site
tcatgacctcagactatca

SEQ ID NO: 1097 - DNA, 19 bp, Homo sapiens
  Cdk8 ribozyme binding site
cctcagactatcagcgttc

SEQ ID NO: 1098 - DNA, 19 bp, Homo sapiens
  Cdk8 ribozyme binding site
tcagactatcagcgttcca

SEQ ID NO: 1099 - DNA, 19 bp, Homo sapiens
  Cdk8 ribozyme binding site
tatcagcgttccaatccac

SEQ ID NO: 1100 - DNA, 19 bp, Homo sapiens
  Cdk8 ribozyme binding site
atcagcgttccaatccaca

SEQ ID NO: 1101 - DNA, 19 bp, Homo sapiens
  Cdk8 ribozyme binding site
cgttccaatccacatgctg

SEQ ID NO: 1102 - DNA, 19 bp, Homo sapiens
  Cdk8 ribozyme binding site
atgctgcctatcccaaccc

SEQ ID NO: 1103 - DNA, 19 bp, Homo sapiens
  Cdk8 ribozyme binding site
gctgcctatcccaaccctg

SEQ ID NO: 1104 - DNA, 19 bp, Homo sapiens
  Cdk8 ribozyme binding site
caagcacatcacagccgca

SEQ ID NO: 1105 - DNA, 19 bp, Homo sapiens
  Cdk8 ribozyme binding site
gcatgggatactcagctac

SEQ ID NO: 1106 - DNA, 19 bp, Homo sapiens
  Cdk8 ribozyme binding site
tgggatactcagctacctc

SEQ ID NO: 1107 - DNA, 19 bp, Homo sapiens
  Cdk8 ribozyme binding site
tactcagctacctcccagc

SEQ ID NO: 1108 - DNA, 19 bp, Homo sapiens
  Cdk8 ribozyme binding site
cagctacctcccagcagcc

SEQ ID NO: 1109 - DNA, 19 bp, Homo sapiens
  Cdk8 ribozyme binding site
cagcagcctccacagtact

SEQ ID NO: 1110 - DNA, 19 bp, Homo sapiens
  Cdk8 ribozyme binding site
ctccacagtactcacatca

SEQ ID NO: 1111 - DNA, 19 bp, Homo sapiens
  Cdk8 ribozyme binding site
cacagtactcacatcagac

SEQ ID NO: 1112 - DNA, 19 bp, Homo sapiens
  Cdk8 ribozyme binding site
tactcacatcagacacatg

SEQ ID NO: 1113 - DNA, 19 bp, Homo sapiens
  Cdk-we-hu ribozyme binding site
cctgcaccttgcggcagaa

SEQ ID NO: 1114 - DNA, 19 bp, Homo sapiens
  Cdk-we-hu ribozyme binding site
gaagctgatcttctcgccc

SEQ ID NO: 1115 - DNA, 19 bp, Homo sapiens
  Cdk-we-hu ribozyme binding site
agctgatcttctcgccctg

SEQ ID NO: 1116 - DNA, 19 bp, Homo sapiens
  Cdk-we-hu ribozyme binding site
gctgatcttctcgccctgc

SEQ ID NO: 1117 - DNA, 19 bp, Homo sapiens
  Cdk-we-hu ribozyme binding site
tgatcttctcgccctgcag

SEQ ID NO: 1118 - DNA, 19 bp, Homo sapiens
  Cdk-we-hu ribozyme binding site
gggaggactcggcctttca

SEQ ID NO: 1119 - DNA, 19 bp, Homo sapiens
  Cdk-we-hu ribozyme binding site
actcggcctttcaagagcc

SEQ ID NO: 1120 - DNA, 19 bp, Homo sapiens
  Cdk-we-hu ribozyme binding site
ctcggcctttcaagagccc

SEQ ID NO: 1121 - DNA, 19 bp, Homo sapiens
  Cdk-we-hu ribozyme binding site
tcggcctttcaagagcccg

SEQ ID NO: 1122 - DNA, 19 bp, Homo sapiens
  Cdk-we-hu ribozyme binding site
agcccgactcgccgctgcc

SEQ ID NO: 1123 - DNA, 19 bp, Homo sapiens
  Cdk-we-hu ribozyme binding site
gccgccgctcgcccgggcc

SEQ ID NO: 1124 - DNA, 19 bp, Homo sapiens
  Cdk-we-hu ribozyme binding site
aggacctgttgctgcccgg

SEQ ID NO: 1125 - DNA, 19 bp, Homo sapiens
  Cdk-we-hu ribozyme binding site
agggcgactcgtgggagga

SEQ ID NO: 1126 - DNA, 19 bp, Homo sapiens
  Cdk-we-hu ribozyme binding site
aggagggcttcggctcctc

SEQ ID NO: 1127 - DNA, 19 bp, Homo sapiens
  Cdk-we-hu ribozyme binding site
ggagggcttcggctcctcg

SEQ ID NO: 1128 - DNA, 19 bp, Homo sapiens
  Cdk-we-hu ribozyme binding site
gcttcggctcctcgtcgcc

SEQ ID NO: 1129 - DNA, 19 bp, Homo sapiens
  Cdk-we-hu ribozyme binding site
tcggctcctcgtcgccggt

SEQ ID NO: 1130 - DNA, 19 bp, Homo sapiens
  Cdk-we-hu ribozyme binding site
gctcctcgtcgccggtcaa

SEQ ID NO: 1131 - DNA, 19 bp, Homo sapiens
  Cdk-we-hu ribozyme binding site
gtcgccggtcaagtcgccg

SEQ ID NO: 1132 - DNA, 19 bp, Homo sapiens
  Cdk-we-hu ribozyme binding site
cggtcaagtcgccggcggc

SEQ ID NO: 1133 - DNA, 19 bp, Homo sapiens
  Cdk-we-hu ribozyme binding site
cggccccctacttcctggg

SEQ ID NO: 1134 - DNA, 19 bp, Homo sapiens
  Cdk-we-hu ribozyme binding site
ccccctacttcctgggtag

SEQ ID NO: 1135 - DNA, 19 bp, Homo sapiens
  Cdk-we-hu ribozyme binding site
cccctacttcctgggtagc

SEQ ID NO: 1136 - DNA, 19 bp, Homo sapiens
  Cdk-we-hu ribozyme binding site
ttcctgggtagctctttct

SEQ ID NO: 1137 - DNA, 19 bp, Homo sapiens
  Cdk-we-hu ribozyme binding site
tgggtagctctttctcgcc

SEQ ID NO: 1138 - DNA, 19 bp, Homo sapiens
  Cdk-we-hu ribozyme binding site
ggtagctctttctcgccgg

SEQ ID NO: 1139 - DNA, 19 bp, Homo sapiens
  Cdk-we-hu ribozyme binding site
gtagctctttctcgccggt

SEQ ID NO: 1140 - DNA, 19 bp, Homo sapiens
  Cdk-we-hu ribozyme binding site
tagctctttctcgccggtg

SEQ ID NO: 1141 - DNA, 19 bp, Homo sapiens
  Cdk-we-hu ribozyme binding site
gctctttctcgccggtgcg

SEQ ID NO: 1142 - DNA, 19 bp, Homo sapiens
  Cdk-we-hu ribozyme binding site
gagatgcgtcgccgcgggg

SEQ ID NO: 1143 - DNA, 19 bp, Homo sapiens
  Cdk-we-hu ribozyme binding site
ccgcggggttgcggggcgc

SEQ ID NO: 1144 - DNA, 19 bp, Homo sapiens
  Cdk-we-hu ribozyme binding site
gccgccgctcgccgcggcc

SEQ ID NO: 1145 - DNA, 19 bp, Homo sapiens
  Cdk-we-hu ribozyme binding site
acaagaccttccgcaagct

SEQ ID NO: 1146 - DNA, 19 bp, Homo sapiens
  Cdk-we-hu ribozyme binding site
caagaccttccgcaagctg

SEQ ID NO: 1147 - DNA, 19 bp, Homo sapiens
  Cdk-we-hu ribozyme binding site
gctgcgactcttcgacacc

SEQ ID NO: 1148 - DNA, 19 bp, Homo sapiens
  Cdk-we-hu ribozyme binding site
tgcgactcttcgacacccc

SEQ ID NO: 1149 - DNA, 19 bp, Homo sapiens
  Cdk-we-hu ribozyme binding site
gcgactcttcgacaccccg

SEQ ID NO: 1150 - DNA, 19 bp, Homo sapiens
  Cdk-we-hu ribozyme binding site
cccaagagtttgctctcca

SEQ ID NO: 1151 - DNA, 19 bp, Homo sapiens
  Cdk-we-hu ribozyme binding site
ccaagagtttgctctccaa

SEQ ID NO: 1152 - DNA, 19 bp, Homo sapiens
  Cdk-we-hu ribozyme binding site
gagtttgctctccaaagct

SEQ ID NO: 1153 - DNA, 19 bp, Homo sapiens
  Cdk-we-hu ribozyme binding site
gtttgctctccaaagctcg

SEQ ID NO: 1154 - DNA, 19 bp, Homo sapiens
  Cdk-we-hu ribozyme binding site
tccaaagctcggggaattg

SEQ ID NO: 1155 - DNA, 19 bp, Homo sapiens
  Cdk-we-hu ribozyme binding site
tcggggaattgattccagc

SEQ ID NO: 1156 - DNA, 19 bp, Homo sapiens
  Cdk-we-hu ribozyme binding site
ggaattgattccagctctg

SEQ ID NO: 1157 - DNA, 19 bp, Homo sapiens
  Cdk-we-hu ribozyme binding site
gaattgattccagctctgt

SEQ ID NO: 1158 - DNA, 19 bp, Homo sapiens
  Cdk-we-hu ribozyme binding site
attccagctctgttaaact

SEQ ID NO: 1159 - DNA, 19 bp, Homo sapiens
  Cdk-we-hu ribozyme binding site
cagctctgttaaactccgg

SEQ ID NO: 1160 - DNA, 19 bp, Homo sapiens
  Cdk-we-hu ribozyme binding site
agctctgttaaactccggg

SEQ ID NO: 1161 - DNA, 19 bp, Homo sapiens
  Cdk-we-hu ribozyme binding site
tgttaaactccggggtagt

SEQ ID NO: 1162 - DNA, 19 bp, Homo sapiens
  Cdk-we-hu ribozyme binding site
ctccggggtagttctctct

SEQ ID NO: 1163 - DNA, 19 bp, Homo sapiens
  Cdk-we-hu ribozyme binding site
cggggtagttctctcttca

SEQ ID NO: 1164 - DNA, 19 bp, Homo sapiens
  Cdk-we-hu ribozyme binding site
ggggtagttctctcttcat

SEQ ID NO: 1165 - DNA, 19 bp, Homo sapiens
  Cdk-we-hu ribozyme binding site
ggtagttctctcttcatgg

SEQ ID NO: 1166 - DNA, 19 bp, Homo sapiens
  Cdk-we-hu ribozyme binding site
tagttctctcttcatggat

SEQ ID NO: 1167 - DNA, 19 bp, Homo sapiens
  Cdk-we-hu ribozyme binding site
gttctctcttcatggatac

SEQ ID NO: 1168 - DNA, 19 bp, Homo sapiens
  Cdk-we-hu ribozyme binding site
ttctctcttcatggataca

SEQ ID NO: 1169 - DNA, 19 bp, Homo sapiens
  Cdk-we-hu ribozyme binding site
ttcatggatacagaaaaat

SEQ ID NO: 1170 - DNA, 19 bp, Homo sapiens
  Cdk-we-hu ribozyme binding site
cagaaaaatcaggaaaaag

SEQ ID NO: 1171 - DNA, 19 bp, Homo sapiens
  Cdk-we-hu ribozyme binding site
aaagggaatttgatgtgcg

SEQ ID NO: 1172 - DNA, 19 bp, Homo sapiens
  Cdk-we-hu ribozyme binding site
aagggaatttgatgtgcga

SEQ ID NO: 1173 - DNA, 19 bp, Homo sapiens
  Cdk-we-hu ribozyme binding site
cgacagactcctcaagtga

SEQ ID NO: 1174 - DNA, 19 bp, Homo sapiens
  Cdk-we-hu ribozyme binding site
cagactcctcaagtgaata

SEQ ID NO: 1175 - DNA, 19 bp, Homo sapiens
  Cdk-we-hu ribozyme binding site
caagtgaatattaatcctt

SEQ ID NO: 1176 - DNA, 19 bp, Homo sapiens
  Cdk-we-hu ribozyme binding site
agtgaatattaatcctttt

SEQ ID NO: 1177 - DNA, 19 bp, Homo sapiens
  Cdk-we-hu ribozyme binding site
gtgaatattaatcctttta

SEQ ID NO: 1178 - DNA, 19 bp, Homo sapiens
  Cdk-we-hu ribozyme binding site
aatattaatccttttactc

SEQ ID NO: 1179 - DNA, 19 bp, Homo sapiens
  Cdk-we-hu ribozyme binding site
attaatccttttactccgg

SEQ ID NO: 1180 - DNA, 19 bp, Homo sapiens
  Cdk-we-hu ribozyme binding site
ttaatccttttactccgga

SEQ ID NO: 1181 - DNA, 19 bp, Homo sapiens
  Cdk-we-hu ribozyme binding site
taatccttttactccggat

SEQ ID NO: 1182 - DNA, 19 bp, Homo sapiens
  Cdk-we-hu ribozyme binding site
aatccttttactccggatt

SEQ ID NO: 1183 - DNA, 19 bp, Homo sapiens
  Cdk-we-hu ribozyme binding site
ccttttactccggattctt

SEQ ID NO: 1184 - DNA, 19 bp, Homo sapiens
  Cdk-we-hu ribozyme binding site
actccggattctttgttgc

SEQ ID NO: 1185 - DNA, 19 bp, Homo sapiens
  Cdk-we-hu ribozyme binding site
ctccggattctttgttgct

SEQ ID NO: 1186 - DNA, 19 bp, Homo sapiens
  Cdk-we-hu ribozyme binding site
ccggattctttgttgcttc

SEQ ID NO: 1187 - DNA, 19 bp, Homo sapiens
  Cdk-we-hu ribozyme binding site
cggattctttgttgcttca

SEQ ID NO: 1188 - DNA, 19 bp, Homo sapiens
  Cdk-we-hu ribozyme binding site
attctttgttgcttcattc

SEQ ID NO: 1189 - DNA, 19 bp, Homo sapiens
  Cdk-we-hu ribozyme binding site
tttgttgcttcattcctca

SEQ ID NO: 1190 - DNA, 19 bp, Homo sapiens
  Cdk-we-hu ribozyme binding site
ttgttgcttcattcctcag

SEQ ID NO: 1191 - DNA, 19 bp, Homo sapiens
  Cdk-we-hu ribozyme binding site
ttgcttcattcctcaggac

SEQ ID NO: 1192 - DNA, 19 bp, Homo sapiens
  Cdk-we-hu ribozyme binding site
tgcttcattcctcaggaca

SEQ ID NO: 1193 - DNA, 19 bp, Homo sapiens
  Cdk-we-hu ribozyme binding site
ttcattcctcaggacagtg

SEQ ID NO: 1194 - DNA, 19 bp, Homo sapiens
  Cdk-we-hu ribozyme binding site
ggacagtgtcgtcgtagaa

SEQ ID NO: 1195 - DNA, 19 bp, Homo sapiens
  Cdk-we-hu ribozyme binding site
cagtgtcgtcgtagaaaga

SEQ ID NO: 1196 - DNA, 19 bp, Homo sapiens
  Cdk-we-hu ribozyme binding site
tgtcgtcgtagaaagagaa

SEQ ID NO: 1197 - DNA, 19 bp, Homo sapiens
  Cdk-we-hu ribozyme binding site
agagaacgtattggaatga

SEQ ID NO: 1198 - DNA, 19 bp, Homo sapiens
  Cdk-we-hu ribozyme binding site
agaacgtattggaatgatt

SEQ ID NO: 1199 - DNA, 19 bp, Homo sapiens
  Cdk-we-hu ribozyme binding site
tggaatgattcctgtggtg

SEQ ID NO: 1200 - DNA, 19 bp, Homo sapiens
  Cdk-we-hu ribozyme binding site
ggaatgattcctgtggtga

SEQ ID NO: 1201 - DNA, 19 bp, Homo sapiens
  Cdk-we-hu ribozyme binding site
gccagtgattatgagcttg

SEQ ID NO: 1202 - DNA, 19 bp, Homo sapiens
  Cdk-we-hu ribozyme binding site
ccagtgattatgagcttga

SEQ ID NO: 1203 - DNA, 19 bp, Homo sapiens
  Cdk-we-hu ribozyme binding site
ttatgagcttgaagatgaa

SEQ ID NO: 1204 - DNA, 19 bp, Homo sapiens
  Cdk-we-hu ribozyme binding site
agacctgctaagagaatta

SEQ ID NO: 1205 - DNA, 19 bp, Homo sapiens
  Cdk-we-hu ribozyme binding site
taagagaattacaattact

SEQ ID NO: 1206 - DNA, 19 bp, Homo sapiens
  Cdk-we-hu ribozyme binding site
aagagaattacaattactg

SEQ ID NO: 1207 - DNA, 19 bp, Homo sapiens
  Cdk-we-hu ribozyme binding site
aattacaattactgaaagc

SEQ ID NO: 1208 - DNA, 19 bp, Homo sapiens
  Cdk-we-hu ribozyme binding site
attacaattactgaaagca

SEQ ID NO: 1209 - DNA, 19 bp, Homo sapiens
  Cdk-we-hu ribozyme binding site
gaaagcaatatgaagtccc

SEQ ID NO: 1210 - DNA, 19 bp, Homo sapiens
  Cdk-we-hu ribozyme binding site
atatgaagtcccggtatac

SEQ ID NO: 1211 - DNA, 19 bp, Homo sapiens
  Cdk-we-hu ribozyme binding site
agtcccggtatacaacaga

SEQ ID NO: 1212 - DNA, 19 bp, Homo sapiens
  Cdk-we-hu ribozyme binding site
tcccggtatacaacagaat

SEQ ID NO: 1213 - DNA, 19 bp, Homo sapiens
  Cdk-we-hu ribozyme binding site
caacagaatttcatgagct

SEQ ID NO: 1214 - DNA, 19 bp, Homo sapiens
  Cdk-we-hu ribozyme binding site
aacagaatttcatgagcta

SEQ ID NO: 1215 - DNA, 19 bp, Homo sapiens
  Cdk-we-hu ribozyme binding site
acagaatttcatgagctag

SEQ ID NO: 1216 - DNA, 19 bp, Homo sapiens
  Cdk-we-hu ribozyme binding site
tcatgagctagagaaaatc

SEQ ID NO: 1217 - DNA, 19 bp, Homo sapiens
  Cdk-we-hu ribozyme binding site
agagaaaatcggctctgga

SEQ ID NO: 1218 - DNA, 19 bp, Homo sapiens
  Cdk-we-hu ribozyme binding site
aaatcggctctggagaatt

SEQ ID NO: 1219 - DNA, 19 bp, Homo sapiens
  Cdk-we-hu ribozyme binding site
ctggagaatttggttctgt

SEQ ID NO: 1220 - DNA, 19 bp, Homo sapiens
  Cdk-we-hu ribozyme binding site
tggagaatttggttctgta

SEQ ID NO: 1221 - DNA, 19 bp, Homo sapiens
  Cdk-we-hu ribozyme binding site
gaatttggttctgtattta

SEQ ID NO: 1222 - DNA, 19 bp, Homo sapiens
  Cdk-we-hu ribozyme binding site
aatttggttctgtatttaa

SEQ ID NO: 1223 - DNA, 19 bp, Homo sapiens
  Cdk-we-hu ribozyme binding site
tggttctgtatttaagtgt

SEQ ID NO: 1224 - DNA, 19 bp, Homo sapiens
  Cdk-we-hu ribozyme binding site
gttctgtatttaagtgtgt

SEQ ID NO: 1225 - DNA, 19 bp, Homo sapiens
  Cdk-we-hu ribozyme binding site
ttctgtatttaagtgtgtg

SEQ ID NO: 1226 - DNA, 19 bp, Homo sapiens
  Cdk-we-hu ribozyme binding site
tctgtatttaagtgtgtga

SEQ ID NO: 1227 - DNA, 19 bp, Homo sapiens
  Cdk-we-hu ribozyme binding site
tggatgcatttatgccatt

SEQ ID NO: 1228 - DNA, 19 bp, Homo sapiens
  Cdk-we-hu ribozyme binding site
ggatgcatttatgccatta

SEQ ID NO: 1229 - DNA, 19 bp, Homo sapiens
  Cdk-we-hu ribozyme binding site
gatgcatttatgccattaa

SEQ ID NO: 1230 - DNA, 19 bp, Homo sapiens
  Cdk-we-hu ribozyme binding site
ttatgccattaagcgatca

SEQ ID NO: 1231 - DNA, 19 bp, Homo sapiens
  Cdk-we-hu ribozyme binding site
tatgccattaagcgatcaa

SEQ ID NO: 1232 - DNA, 19 bp, Homo sapiens
  Cdk-we-hu ribozyme binding site
ttaagcgatcaaaaaagcc

SEQ ID NO: 1233 - DNA, 19 bp, Homo sapiens
  Cdk-we-hu ribozyme binding site
aaaagccattggcgggctc

SEQ ID NO: 1234 - DNA, 19 bp, Homo sapiens
  Cdk-we-hu ribozyme binding site
tggcgggctctgttgatga

SEQ ID NO: 1235 - DNA, 19 bp, Homo sapiens
  Cdk-we-hu ribozyme binding site
gggctctgttgatgagcag

SEQ ID NO: 1236 - DNA, 19 bp, Homo sapiens
  Cdk-we-hu ribozyme binding site
cagaacgctttgagagaag

SEQ ID NO: 1237 - DNA, 19 bp, Homo sapiens
  Cdk-we-hu ribozyme binding site
agaacgctttgagagaagt

SEQ ID NO: 1238 - DNA, 19 bp, Homo sapiens
  Cdk-we-hu ribozyme binding site
gagagaagtatatgctcat

SEQ ID NO: 1239 - DNA, 19 bp, Homo sapiens
  Cdk-we-hu ribozyme binding site
gagaagtatatgctcatgc

SEQ ID NO: 1240 - DNA, 19 bp, Homo sapiens
  Cdk-we-hu ribozyme binding site
gtatatgctcatgcagtgc

SEQ ID NO: 1241 - DNA, 19 bp, Homo sapiens
  Cdk-we-hu ribozyme binding site
tgcagtgcttggacagcat

SEQ ID NO: 1242 - DNA, 19 bp, Homo sapiens
  Cdk-we-hu ribozyme binding site
ggacagcattctcatgtag

SEQ ID NO: 1243 - DNA, 19 bp, Homo sapiens
  Cdk-we-hu ribozyme binding site
gacagcattctcatgtagt

SEQ ID NO: 1244 - DNA, 19 bp, Homo sapiens
  Cdk-we-hu ribozyme binding site
cagcattctcatgtagttc

SEQ ID NO: 1245 - DNA, 19 bp, Homo sapiens
  Cdk-we-hu ribozyme binding site
ttctcatgtagttcgatat

SEQ ID NO: 1246 - DNA, 19 bp, Homo sapiens
  Cdk-we-hu ribozyme binding site
tcatgtagttcgatatttc

SEQ ID NO: 1247 - DNA, 19 bp, Homo sapiens
  Cdk-we-hu ribozyme binding site
catgtagttcgatatttct

SEQ ID NO: 1248 - DNA, 19 bp, Homo sapiens
  Cdk-we-hu ribozyme binding site
tagttcgatatttctctgc

SEQ ID NO: 1249 - DNA, 19 bp, Homo sapiens
  Cdk-we-hu ribozyme binding site
gttcgatatttctctgcgt

SEQ ID NO: 1250 - DNA, 19 bp, Homo sapiens
  Cdk-we-hu ribozyme binding site
ttcgatatttctctgcgtg

SEQ ID NO: 1251 - DNA, 19 bp, Homo sapiens
  Cdk-we-hu ribozyme binding site
tcgatatttctctgcgtgg

SEQ ID NO: 1252 - DNA, 19 bp, Homo sapiens
  Cdk-we-hu ribozyme binding site
gatatttctctgcgtgggc

SEQ ID NO: 1253 - DNA, 19 bp, Homo sapiens
  Cdk-we-hu ribozyme binding site
gaagatgatcatatgctta

SEQ ID NO: 1254 - DNA, 19 bp, Homo sapiens
  Cdk-we-hu ribozyme binding site
gatgatcatatgcttatac

SEQ ID NO: 1255 - DNA, 19 bp, Homo sapiens
  Cdk-we-hu ribozyme binding site
tcatatgcttatacagaat

SEQ ID NO: 1256 - DNA, 19 bp, Homo sapiens
  Cdk-we-hu ribozyme binding site
catatgcttatacagaatg

SEQ ID NO: 1257 - DNA, 19 bp, Homo sapiens
  Cdk-we-hu ribozyme binding site
tatgcttatacagaatgaa

SEQ ID NO: 1258 - DNA, 19 bp, Homo sapiens
  Cdk-we-hu ribozyme binding site
agaatgaatattgtaatgg

SEQ ID NO: 1259 - DNA, 19 bp, Homo sapiens
  Cdk-we-hu ribozyme binding site
aatgaatattgtaatggtg

SEQ ID NO: 1260 - DNA, 19 bp, Homo sapiens
  Cdk-we-hu ribozyme binding site
gaatattgtaatggtggaa

SEQ ID NO: 1261 - DNA, 19 bp, Homo sapiens
  Cdk-we-hu ribozyme binding site
ggtggaagtttagctgatg

SEQ ID NO: 1262 - DNA, 19 bp, Homo sapiens
  Cdk-we-hu ribozyme binding site
gtggaagtttagctgatgc

SEQ ID NO: 1263 - DNA, 19 bp, Homo sapiens
  Cdk-we-hu ribozyme binding site
tggaagtttagctgatgct

SEQ ID NO: 1264 - DNA, 19 bp, Homo sapiens
  Cdk-we-hu ribozyme binding site
gctgatgctataagtgaaa

SEQ ID NO: 1265 - DNA, 19 bp, Homo sapiens
  Cdk-we-hu ribozyme binding site
tgatgctataagtgaaaac

SEQ ID NO: 1266 - DNA, 19 bp, Homo sapiens
  Cdk-we-hu ribozyme binding site
gtgaaaactacagaatcat

SEQ ID NO: 1267 - DNA, 19 bp, Homo sapiens
  Cdk-we-hu ribozyme binding site
ctacagaatcatgagttac

SEQ ID NO: 1268 - DNA, 19 bp, Homo sapiens
  Cdk-we-hu ribozyme binding site
atcatgagttactttaaag

SEQ ID NO: 1269 - DNA, 19 bp, Homo sapiens
  Cdk-we-hu ribozyme binding site
tcatgagttactttaaaga

SEQ ID NO: 1270 - DNA, 19 bp, Homo sapiens
  Cdk-we-hu ribozyme binding site
tgagttactttaaagaagc

SEQ ID NO: 1271 - DNA, 19 bp, Homo sapiens
  Cdk-we-hu ribozyme binding site
gagttactttaaagaagca

SEQ ID NO: 1272 - DNA, 19 bp, Homo sapiens
  Cdk-we-hu ribozyme binding site
agttactttaaagaagcag

SEQ ID NO: 1273 - DNA, 19 bp, Homo sapiens
  Cdk-we-hu ribozyme binding site
aagcagagttgaaggatct

SEQ ID NO: 1274 - DNA, 19 bp, Homo sapiens
  Cdk-we-hu ribozyme binding site
ttgaaggatctccttttgc

SEQ ID NO: 1275 - DNA, 19 bp, Homo sapiens
  Cdk-we-hu ribozyme binding site
gaaggatctccttttgcaa

SEQ ID NO: 1276 - DNA, 19 bp, Homo sapiens
  Cdk-we-hu ribozyme binding site
ggatctccttttgcaagtt

SEQ ID NO: 1277 - DNA, 19 bp, Homo sapiens
  Cdk-we-hu ribozyme binding site
gatctccttttgcaagttg

SEQ ID NO: 1278 - DNA, 19 bp, Homo sapiens
  Cdk-we-hu ribozyme binding site
atctccttttgcaagttgg

SEQ ID NO: 1279 - DNA, 19 bp, Homo sapiens
  Cdk-we-hu ribozyme binding site
tttgcaagttggccgaggc

SEQ ID NO: 1280 - DNA, 19 bp, Homo sapiens
  Cdk-we-hu ribozyme binding site
gccgaggcttgaggtatat

SEQ ID NO: 1281 - DNA, 19 bp, Homo sapiens
  Cdk-we-hu ribozyme binding site
gcttgaggtatattcattc

SEQ ID NO: 1282 - DNA, 19 bp, Homo sapiens
  Cdk-we-hu ribozyme binding site
ttgaggtatattcattcaa

SEQ ID NO: 1283 - DNA, 19 bp, Homo sapiens
  Cdk-we-hu ribozyme binding site
gaggtatattcattcaatg

SEQ ID NO: 1284 - DNA, 19 bp, Homo sapiens
  Cdk-we-hu ribozyme binding site
aggtatattcattcaatgt

SEQ ID NO: 1285 - DNA, 19 bp, Homo sapiens
  Cdk-we-hu ribozyme binding site
tatattcattcaatgtctt

SEQ ID NO: 1286 - DNA, 19 bp, Homo sapiens
  Cdk-we-hu ribozyme binding site
atattcattcaatgtcttt

SEQ ID NO: 1287 - DNA, 19 bp, Homo sapiens
  Cdk-we-hu ribozyme binding site
attcaatgtctttggttca

SEQ ID NO: 1288 - DNA, 19 bp, Homo sapiens
  Cdk-we-hu ribozyme binding site
tcaatgtctttggttcaca

SEQ ID NO: 1289 - DNA, 19 bp, Homo sapiens
  Cdk-we-hu ribozyme binding site
caatgtctttggttcacat

SEQ ID NO: 1290 - DNA, 19 bp, Homo sapiens
  Cdk-we-hu ribozyme binding site
gtctttggttcacatggat

SEQ ID NO: 1291 - DNA, 19 bp, Homo sapiens
  Cdk-we-hu ribozyme binding site
tctttggttcacatggata

SEQ ID NO: 1292 - DNA, 19 bp, Homo sapiens
  Cdk-we-hu ribozyme binding site
cacatggatataaaaccta

SEQ ID NO: 1293 - DNA, 19 bp, Homo sapiens
  Cdk-we-hu ribozyme binding site
catggatataaaacctagt

SEQ ID NO: 1294 - DNA, 19 bp, Homo sapiens
  Cdk-we-hu ribozyme binding site
ataaaacctagtaatattt

SEQ ID NO: 1295 - DNA, 19 bp, Homo sapiens
  Cdk-we-hu ribozyme binding site
aaacctagtaatattttca

SEQ ID NO: 1296 - DNA, 19 bp, Homo sapiens
  Cdk-we-hu ribozyme binding site
cctagtaatattttcatat

SEQ ID NO: 1297 - DNA, 19 bp, Homo sapiens
  Cdk-we-hu ribozyme binding site
tagtaatattttcatatct

SEQ ID NO: 1298 - DNA, 19 bp, Homo sapiens
  Cdk-we-hu ribozyme binding site
agtaatattttcatatctc

SEQ ID NO: 1299 - DNA, 19 bp, Homo sapiens
  Cdk-we-hu ribozyme binding site
gtaatattttcatatctcg

SEQ ID NO: 1300 - DNA, 19 bp, Homo sapiens
  Cdk-we-hu ribozyme binding site
taatattttcatatctcga

SEQ ID NO: 1301 - DNA, 19 bp, Homo sapiens
  Cdk-we-hu ribozyme binding site
tattttcatatctcgaacc

SEQ ID NO: 1302 - DNA, 19 bp, Homo sapiens
  Cdk-we-hu ribozyme binding site
ttttcatatctcgaacctc

SEQ ID NO: 1303 - DNA, 19 bp, Homo sapiens
  Cdk-we-hu ribozyme binding site
ttcatatctcgaacctcaa

SEQ ID NO: 1304 - DNA, 19 bp, Homo sapiens
  Cdk-we-hu ribozyme binding site
ctcgaacctcaatcccaaa

SEQ ID NO: 1305 - DNA, 19 bp, Homo sapiens
  Cdk-we-hu ribozyme binding site
aacctcaatcccaaatgct

SEQ ID NO: 1306 - DNA, 19 bp, Homo sapiens
  Cdk-we-hu ribozyme binding site
atgctgcctctgaagaagg

SEQ ID NO: 1307 - DNA, 19 bp, Homo sapiens
  Cdk-we-hu ribozyme binding site
gaagatgattgggcatcca

SEQ ID NO: 1308 - DNA, 19 bp, Homo sapiens
  Cdk-we-hu ribozyme binding site
attgggcatccaacaaagt

SEQ ID NO: 1309 - DNA, 19 bp, Homo sapiens
  Cdk-we-hu ribozyme binding site
caacaaagttatgtttaaa

SEQ ID NO: 1310 - DNA, 19 bp, Homo sapiens
  Cdk-we-hu ribozyme binding site
aacaaagttatgtttaaaa

SEQ ID NO: 1311 - DNA, 19 bp, Homo sapiens
  Cdk-we-hu ribozyme binding site
aagttatgtttaaaatagg

SEQ ID NO: 1312 - DNA, 19 bp, Homo sapiens
  Cdk-we-hu ribozyme binding site
agttatgtttaaaataggt

SEQ ID NO: 1313 - DNA, 19 bp, Homo sapiens
  Cdk-we-hu ribozyme binding site
gttatgtttaaaataggtg

SEQ ID NO: 1314 - DNA, 19 bp, Homo sapiens
  Cdk-we-hu ribozyme binding site
gtttaaaataggtgatctt

SEQ ID NO: 1315 - DNA, 19 bp, Homo sapiens
  Cdk-we-hu ribozyme binding site
ataggtgatcttgggcatg

SEQ ID NO: 1316 - DNA, 19 bp, Homo sapiens
  Cdk-we-hu ribozyme binding site
aggtgatcttgggcatgta

SEQ ID NO: 1317 - DNA, 19 bp, Homo sapiens
  Cdk-we-hu ribozyme binding site
tgggcatgtaacaaggatc

SEQ ID NO: 1318 - DNA, 19 bp, Homo sapiens
  Cdk-we-hu ribozyme binding site
aacaaggatctccagtcca

SEQ ID NO: 1319 - DNA, 19 bp, Homo sapiens
  Cdk-we-hu ribozyme binding site
caaggatctccagtccaca

SEQ ID NO: 1320 - DNA, 19 bp, Homo sapiens
  Cdk-we-hu ribozyme binding site
atctccagtccacaagttg

SEQ ID NO: 1321 - DNA, 19 bp, Homo sapiens
  Cdk-we-hu ribozyme binding site
tccacaagttgaagagggc

SEQ ID NO: 1322 - DNA, 19 bp, Homo sapiens
  Cdk-we-hu ribozyme binding site
gagggcgatagtcgttttc

SEQ ID NO: 1323 - DNA, 19 bp, Homo sapiens
  Cdk-we-hu ribozyme binding site
ggcgatagtcgttttcttg

SEQ ID NO: 1324 - DNA, 19 bp, Homo sapiens
  Cdk-we-hu ribozyme binding site
gatagtcgttttcttgcaa

SEQ ID NO: 1325 - DNA, 19 bp, Homo sapiens
  Cdk-we-hu ribozyme binding site
atagtcgttttcttgcaaa

SEQ ID NO: 1326 - DNA, 19 bp, Homo sapiens
  Cdk-we-hu ribozyme binding site
tagtcgttttcttgcaaat

SEQ ID NO: 1327 - DNA, 19 bp, Homo sapiens
  Cdk-we-hu ribozyme binding site
agtcgttttcttgcaaatg

SEQ ID NO: 1328 - DNA, 19 bp, Homo sapiens
  Cdk-we-hu ribozyme binding site
tcgttttcttgcaaatgaa

SEQ ID NO: 1329 - DNA, 19 bp, Homo sapiens
  Cdk-we-hu ribozyme binding site
aaatgaagttttacaggag

SEQ ID NO: 1330 - DNA, 19 bp, Homo sapiens
  Cdk-we-hu ribozyme binding site
aatgaagttttacaggaga

SEQ ID NO: 1331 - DNA, 19 bp, Homo sapiens
  Cdk-we-hu ribozyme binding site
atgaagttttacaggagaa

SEQ ID NO: 1332 - DNA, 19 bp, Homo sapiens
  Cdk-we-hu ribozyme binding site
tgaagttttacaggagaat

SEQ ID NO: 1333 - DNA, 19 bp, Homo sapiens
  Cdk-we-hu ribozyme binding site
caggagaattatacccatc

SEQ ID NO: 1334 - DNA, 19 bp, Homo sapiens
  Cdk-we-hu ribozyme binding site
aggagaattatacccatct

SEQ ID NO: 1335 - DNA, 19 bp, Homo sapiens
  Cdk-we-hu ribozyme binding site
gagaattatacccatctac

SEQ ID NO: 1336 - DNA, 19 bp, Homo sapiens
  Cdk-we-hu ribozyme binding site
tatacccatctaccaaaag

SEQ ID NO: 1337 - DNA, 19 bp, Homo sapiens
  Cdk-we-hu ribozyme binding site
tacccatctaccaaaagca

SEQ ID NO: 1338 - DNA, 19 bp, Homo sapiens
  Cdk-we-hu ribozyme binding site
aaagcagatatttttgcgc

SEQ ID NO: 1339 - DNA, 19 bp, Homo sapiens
  Cdk-we-hu ribozyme binding site
agcagatatttttgcgctt

SEQ ID NO: 1340 - DNA, 19 bp, Homo sapiens
  Cdk-we-hu ribozyme binding site
gcagatatttttgcgcttg

SEQ ID NO: 1341 - DNA, 19 bp, Homo sapiens
  Cdk-we-hu ribozyme binding site
cagatatttttgcgcttgc

SEQ ID NO: 1342 - DNA, 19 bp, Homo sapiens
  Cdk-we-hu ribozyme binding site
agatatttttgcgcttgcc

SEQ ID NO: 1343 - DNA, 19 bp, Homo sapiens
  Cdk-we-hu ribozyme binding site
ttttgcgcttgccctcaca

SEQ ID NO: 1344 - DNA, 19 bp, Homo sapiens
  Cdk-we-hu ribozyme binding site
gcttgccctcacagtggta

SEQ ID NO: 1345 - DNA, 19 bp, Homo sapiens
  Cdk-we-hu ribozyme binding site
cacagtggtatgtgctgct

SEQ ID NO: 1346 - DNA, 19 bp, Homo sapiens
  Cdk-we-hu ribozyme binding site
gctgaacctcttccgagaa

SEQ ID NO: 1347 - DNA, 19 bp, Homo sapiens
  Cdk-we-hu ribozyme binding site
tgaacctcttccgagaaat

SEQ ID NO: 1348 - DNA, 19 bp, Homo sapiens
  Cdk-we-hu ribozyme binding site
gaacctcttccgagaaatg

SEQ ID NO: 1349 - DNA, 19 bp, Homo sapiens
  Cdk-we-hu ribozyme binding site
aatggagatcaatggcatg

SEQ ID NO: 1350 - DNA, 19 bp, Homo sapiens
  Cdk-we-hu ribozyme binding site
gcatgaaatcagacagggt

SEQ ID NO: 1351 - DNA, 19 bp, Homo sapiens
  Cdk-we-hu ribozyme binding site
agacagggtagattacctc

SEQ ID NO: 1352 - DNA, 19 bp, Homo sapiens
  Cdk-we-hu ribozyme binding site
agggtagattacctcggat

SEQ ID NO: 1353 - DNA, 19 bp, Homo sapiens
  Cdk-we-hu ribozyme binding site
gggtagattacctcggata

SEQ ID NO: 1354 - DNA, 19 bp, Homo sapiens
  Cdk-we-hu ribozyme binding site
agattacctcggataccac

SEQ ID NO: 1355 - DNA, 19 bp, Homo sapiens
  Cdk-we-hu ribozyme binding site
acctcggataccacaagtg

SEQ ID NO: 1356 - DNA, 19 bp, Homo sapiens
  Cdk-we-hu ribozyme binding site
acaagtgctttcccaagaa

SEQ ID NO: 1357 - DNA, 19 bp, Homo sapiens
  Cdk-we-hu ribozyme binding site
caagtgctttcccaagaat

SEQ ID NO: 1358 - DNA, 19 bp, Homo sapiens
  Cdk-we-hu ribozyme binding site
aagtgctttcccaagaatt

SEQ ID NO: 1359 - DNA, 19 bp, Homo sapiens
  Cdk-we-hu ribozyme binding site
cccaagaatttacagagtt

SEQ ID NO: 1360 - DNA, 19 bp, Homo sapiens
  Cdk-we-hu ribozyme binding site
ccaagaatttacagagttg

SEQ ID NO: 1361 - DNA, 19 bp, Homo sapiens
  Cdk-we-hu ribozyme binding site
caagaatttacagagttgc

SEQ ID NO: 1362 - DNA, 19 bp, Homo sapiens
  Cdk-we-hu ribozyme binding site
ttacagagttgctaaaagt

SEQ ID NO: 1363 - DNA, 19 bp, Homo sapiens
  Cdk-we-hu ribozyme binding site
agagttgctaaaagttatg

SEQ ID NO: 1364 - DNA, 19 bp, Homo sapiens
  Cdk-we-hu ribozyme binding site
gctaaaagttatgattcat

SEQ ID NO: 1365 - DNA, 19 bp, Homo sapiens
  Cdk-we-hu ribozyme binding site
ctaaaagttatgattcatc

SEQ ID NO: 1366 - DNA, 19 bp, Homo sapiens
  Cdk-we-hu ribozyme binding site
agttatgattcatccagat

SEQ ID NO: 1367 - DNA, 19 bp, Homo sapiens
  Cdk-we-hu ribozyme binding site
gttatgattcatccagatc

SEQ ID NO: 1368 - DNA, 19 bp, Homo sapiens
  Cdk-we-hu ribozyme binding site
atgattcatccagatccag

SEQ ID NO: 1369 - DNA, 19 bp, Homo sapiens
  Cdk-we-hu ribozyme binding site
catccagatccagagagaa

SEQ ID NO: 1370 - DNA, 19 bp, Homo sapiens
  Cdk-we-hu ribozyme binding site
agaagaccttcagcaatgg

SEQ ID NO: 1371 - DNA, 19 bp, Homo sapiens
  Cdk-we-hu ribozyme binding site
gaagaccttcagcaatggc

SEQ ID NO: 1372 - DNA, 19 bp, Homo sapiens
  Cdk-we-hu ribozyme binding site
ggcactggtaaagcattca

SEQ ID NO: 1373 - DNA, 19 bp, Homo sapiens
  Cdk-we-hu ribozyme binding site
gtaaagcattcagtattgc

SEQ ID NO: 1374 - DNA, 19 bp, Homo sapiens
  Cdk-we-hu ribozyme binding site
taaagcattcagtattgct

SEQ ID NO: 1375 - DNA, 19 bp, Homo sapiens
  Cdk-we-hu ribozyme binding site
gcattcagtattgctgtcc

SEQ ID NO: 1376 - DNA, 19 bp, Homo sapiens
  Cdk-we-hu ribozyme binding site
attcagtattgctgtccgc

SEQ ID NO: 1377 - DNA, 19 bp, Homo sapiens
  Cdk-we-hu ribozyme binding site
tattgctgtccgcttctag

SEQ ID NO: 1378 - DNA, 19 bp, Homo sapiens
  Cdk-we-hu ribozyme binding site
ctgtccgcttctagaaaga

SEQ ID NO: 1379 - DNA, 19 bp, Homo sapiens
  Cdk-we-hu ribozyme binding site
tgtccgcttctagaaagag

SEQ ID NO: 1380 - DNA, 19 bp, Homo sapiens
  Cdk-we-hu ribozyme binding site
tccgcttctagaaagagtg

SEQ ID NO: 1381 - DNA, 19 bp, Homo sapiens
  Cdk-we-hu ribozyme binding site
cagaacaattacgaataga

SEQ ID NO: 1382 - DNA, 19 bp, Homo sapiens
  Cdk-we-hu ribozyme binding site
agaacaattacgaatagaa

SEQ ID NO: 1383 - DNA, 19 bp, Homo sapiens
  Cdk-we-hu ribozyme binding site
attacgaatagaattgaat

SEQ ID NO: 1384 - DNA, 19 bp, Homo sapiens
  Cdk-we-hu ribozyme binding site
gaatagaattgaatgccga

SEQ ID NO: 1385 - DNA, 19 bp, Homo sapiens
  Cdk-we-hu ribozyme binding site
ccgaaaagttcaaaaattc

SEQ ID NO: 1386 - DNA, 19 bp, Homo sapiens
  Cdk-we-hu ribozyme binding site
cgaaaagttcaaaaattca

SEQ ID NO: 1387 - DNA, 19 bp, Homo sapiens
  Cdk-we-hu ribozyme binding site
ttcaaaaattcacttttac

SEQ ID NO: 1388 - DNA, 19 bp, Homo sapiens
  Cdk-we-hu ribozyme binding site
tcaaaaattcacttttaca

SEQ ID NO: 1389 - DNA, 19 bp, Homo sapiens
  Cdk-we-hu ribozyme binding site
aaattcacttttacaaaaa

SEQ ID NO: 1390 - DNA, 19 bp, Homo sapiens
  Cdk-we-hu ribozyme binding site
aattcacttttacaaaaag

SEQ ID NO: 1391 - DNA, 19 bp, Homo sapiens
  Cdk-we-hu ribozyme binding site
attcacttttacaaaaaga

SEQ ID NO: 1392 - DNA, 19 bp, Homo sapiens
  Cdk-we-hu ribozyme binding site
ttcacttttacaaaaagaa

SEQ ID NO: 1393 - DNA, 19 bp, Homo sapiens
  Cdk-we-hu ribozyme binding site
aaaagaactcaagaaagca

SEQ ID NO: 1394 - DNA, 19 bp, Homo sapiens
  Cdk-we-hu ribozyme binding site
aagagcactcttcactgac

SEQ ID NO: 1395 - DNA, 19 bp, Homo sapiens
  Cdk-we-hu ribozyme binding site
gagcactcttcactgaccg

SEQ ID NO: 1396 - DNA, 19 bp, Homo sapiens
  Cdk-we-hu ribozyme binding site
agcactcttcactgaccgg

SEQ ID NO: 1397 - DNA, 19 bp, Homo sapiens
  Cdk-we-hu ribozyme binding site
atggccactaggtccacca

SEQ ID NO: 1398 - DNA, 19 bp, Homo sapiens
  Cdk-we-hu ribozyme binding site
acccagagtaatagaacat

SEQ ID NO: 1399 - DNA, 19 bp, Homo sapiens
  Cdk-we-hu ribozyme binding site
cagagtaatagaacatctc

SEQ ID NO: 1400 - DNA, 19 bp, Homo sapiens
  Cdk-we-hu ribozyme binding site
atagaacatctcgacttat

SEQ ID NO: 1401 - DNA, 19 bp, Homo sapiens
  Cdk-we-hu ribozyme binding site
agaacatctcgacttattg

SEQ ID NO: 1402 - DNA, 19 bp, Homo sapiens
  Cdk-we-hu ribozyme binding site
atctcgacttattggaaag

SEQ ID NO: 1403 - DNA, 19 bp, Homo sapiens
  Cdk-we-hu ribozyme binding site
tctcgacttattggaaaga

SEQ ID NO: 1404 - DNA, 19 bp, Homo sapiens
  Cdk-we-hu ribozyme binding site
tcgacttattggaaagaaa

SEQ ID NO: 1405 - DNA, 19 bp, Homo sapiens
  Cdk-we-hu ribozyme binding site
tgaaccgctctgtcagcct

SEQ ID NO: 1406 - DNA, 19 bp, Homo sapiens
  Cdk-we-hu ribozyme binding site
ccgctctgtcagccttact

SEQ ID NO: 1407 - DNA, 19 bp, Homo sapiens
  Cdk-we-hu ribozyme binding site
tgtcagccttactatatac

SEQ ID NO: 1408 - DNA, 19 bp, Homo sapiens
  Cdk-we-hu ribozyme binding site
gtcagccttactatatact

SEQ ID NO: 1409 - DNA, 19 bp, Homo sapiens
  Cyclin A2 ribozyme binding site
tgggcaactctgcgccggg

SEQ ID NO: 1410 - DNA, 19 bp, Homo sapiens
  Cyclin A2 ribozyme binding site
aggcgggctcggcgctgct

SEQ ID NO: 1411 - DNA, 19 bp, Homo sapiens
  Cyclin A2 ribozyme binding site
ggcgctgctagcattgcag

SEQ ID NO: 1412 - DNA, 19 bp, Homo sapiens
  Cyclin A2 ribozyme binding site
tgctagcattgcagcagac

SEQ ID NO: 1413 - DNA, 19 bp, Homo sapiens
  Cyclin A2 ribozyme binding site
gacggcgctccaagaggac

SEQ ID NO: 1414 - DNA, 19 bp, Homo sapiens
  Cyclin A2 ribozyme binding site
caggagaatatcaacccgg

SEQ ID NO: 1415 - DNA, 19 bp, Homo sapiens
  Cyclin A2 ribozyme binding site
ggagaatatcaacccggaa

SEQ ID NO: 1416 - DNA, 19 bp, Homo sapiens
  Cyclin A2 ribozyme binding site
agcgcccgtccaacaaccg

SEQ ID NO: 1417 - DNA, 19 bp, Homo sapiens
  Cyclin A2 ribozyme binding site
gctggcggtactgaagtcc

SEQ ID NO: 1418 - DNA, 19 bp, Homo sapiens
  Cyclin A2 ribozyme binding site
tactgaagtccgggaaccc

SEQ ID NO: 1419 - DNA, 19 bp, Homo sapiens
  Cyclin A2 ribozyme binding site
ccgcggggtctagcgcagc

SEQ ID NO: 1420 - DNA, 19 bp, Homo sapiens
  Cyclin A2 ribozyme binding site
gcggggtctagcgcagcag

SEQ ID NO: 1421 - DNA, 19 bp, Homo sapiens
  Cyclin A2 ribozyme binding site
gagacgggttgcacccctt

SEQ ID NO: 1422 - DNA, 19 bp, Homo sapiens
  Cyclin A2 ribozyme binding site
tgcaccccttaaggatctt

SEQ ID NO: 1423 - DNA, 19 bp, Homo sapiens
  Cyclin A2 ribozyme binding site
gcaccccttaaggatcttc

SEQ ID NO: 1424 - DNA, 19 bp, Homo sapiens
  Cyclin A2 ribozyme binding site
cttaaggatcttcctgtaa

SEQ ID NO: 1425 - DNA, 19 bp, Homo sapiens
  Cyclin A2 ribozyme binding site
taaggatcttcctgtaaat

SEQ ID NO: 1426 - DNA, 19 bp, Homo sapiens
  Cyclin A2 ribozyme binding site
aaggatcttcctgtaaatg

SEQ ID NO: 1427 - DNA, 19 bp, Homo sapiens
  Cyclin A2 ribozyme binding site
tcttcctgtaaatgatgag

SEQ ID NO: 1428 - DNA, 19 bp, Homo sapiens
  Cyclin A2 ribozyme binding site
tgagcatgtcaccgttcct

SEQ ID NO: 1429 - DNA, 19 bp, Homo sapiens
  Cyclin A2 ribozyme binding site
tgtcaccgttcctccttgg

SEQ ID NO: 1430 - DNA, 19 bp, Homo sapiens
  Cyclin A2 ribozyme binding site
gtcaccgttcctccttgga

SEQ ID NO: 1431 - DNA, 19 bp, Homo sapiens
  Cyclin A2 ribozyme binding site
accgttcctccttggaaag

SEQ ID NO: 1432 - DNA, 19 bp, Homo sapiens
  Cyclin A2 ribozyme binding site
gttcctccttggaaagcaa

SEQ ID NO: 1433 - DNA, 19 bp, Homo sapiens
  Cyclin A2 ribozyme binding site
gcaaacagtaaacagcctg

SEQ ID NO: 1434 - DNA, 19 bp, Homo sapiens
  Cyclin A2 ribozyme binding site
agcctgcgttcaccattca

SEQ ID NO: 1435 - DNA, 19 bp, Homo sapiens
  Cyclin A2 ribozyme binding site
gcctgcgttcaccattcat

SEQ ID NO: 1436 - DNA, 19 bp, Homo sapiens
  Cyclin A2 ribozyme binding site
gttcaccattcatgtggat

SEQ ID NO: 1437 - DNA, 19 bp, Homo sapiens
  Cyclin A2 ribozyme binding site
ttcaccattcatgtggatg

SEQ ID NO: 1438 - DNA, 19 bp, Homo sapiens
  Cyclin A2 ribozyme binding site
aaagaagctcagaagaagc

SEQ ID NO: 1439 - DNA, 19 bp, Homo sapiens
  Cyclin A2 ribozyme binding site
cagctgaatctcaaaaaat

SEQ ID NO: 1440 - DNA, 19 bp, Homo sapiens
  Cyclin A2 ribozyme binding site
gctgaatctcaaaaaatag

SEQ ID NO: 1441 - DNA, 19 bp, Homo sapiens
  Cyclin A2 ribozyme binding site
tcaaaaaatagagcgtgaa

SEQ ID NO: 1442 - DNA, 19 bp, Homo sapiens
  Cyclin A2 ribozyme binding site
gccctggcttttaattcag

SEQ ID NO: 1443 - DNA, 19 bp, Homo sapiens
  Cyclin A2 ribozyme binding site
ccctggcttttaattcagc

SEQ ID NO: 1444 - DNA, 19 bp, Homo sapiens
  Cyclin A2 ribozyme binding site
cctggcttttaattcagcc

SEQ ID NO: 1445 - DNA, 19 bp, Homo sapiens
  Cyclin A2 ribozyme binding site
ctggcttttaattcagcca

SEQ ID NO: 1446 - DNA, 19 bp, Homo sapiens
  Cyclin A2 ribozyme binding site
gcttttaattcagccatta

SEQ ID NO: 1447 - DNA, 19 bp, Homo sapiens
  Cyclin A2 ribozyme binding site
cttttaattcagccattag

SEQ ID NO: 1448 - DNA, 19 bp, Homo sapiens
  Cyclin A2 ribozyme binding site
ttcagccattagtttacct

SEQ ID NO: 1449 - DNA, 19 bp, Homo sapiens
  Cyclin A2 ribozyme binding site
tcagccattagtttacctg

SEQ ID NO: 1450 - DNA, 19 bp, Homo sapiens
  Cyclin A2 ribozyme binding site
gccattagtttacctggac

SEQ ID NO: 1451 - DNA, 19 bp, Homo sapiens
  Cyclin A2 ribozyme binding site
ccattagtttacctggacc

SEQ ID NO: 1452 - DNA, 19 bp, Homo sapiens
  Cyclin A2 ribozyme binding site
cattagtttacctggaccc

SEQ ID NO: 1453 - DNA, 19 bp, Homo sapiens
  Cyclin A2 ribozyme binding site
gaaaaccattggtccctct

SEQ ID NO: 1454 - DNA, 19 bp, Homo sapiens
  Cyclin A2 ribozyme binding site
accattggtccctcttgat

SEQ ID NO: 1455 - DNA, 19 bp, Homo sapiens
  Cyclin A2 ribozyme binding site
ttggtccctcttgattatc

SEQ ID NO: 1456 - DNA, 19 bp, Homo sapiens
  Cyclin A2 ribozyme binding site
ggtccctcttgattatcca

SEQ ID NO: 1457 - DNA, 19 bp, Homo sapiens
  Cyclin A2 ribozyme binding site
cctcttgattatccaatgg

SEQ ID NO: 1458 - DNA, 19 bp, Homo sapiens
  Cyclin A2 ribozyme binding site
ctcttgattatccaatgga

SEQ ID NO: 1459 - DNA, 19 bp, Homo sapiens
  Cyclin A2 ribozyme binding site
cttgattatccaatggatg

SEQ ID NO: 1460 - DNA, 19 bp, Homo sapiens
  Cyclin A2 ribozyme binding site
atggatggtagttttgagt

SEQ ID NO: 1461 - DNA, 19 bp, Homo sapiens
  Cyclin A2 ribozyme binding site
gatggtagttttgagtcac

SEQ ID NO: 1462 - DNA, 19 bp, Homo sapiens
  Cyclin A2 ribozyme binding site
atggtagttttgagtcacc

SEQ ID NO: 1463 - DNA, 19 bp, Homo sapiens
  Cyclin A2 ribozyme binding site
tggtagttttgagtcacca

SEQ ID NO: 1464 - DNA, 19 bp, Homo sapiens
  Cyclin A2 ribozyme binding site
gttttgagtcaccacatac

SEQ ID NO: 1465 - DNA, 19 bp, Homo sapiens
  Cyclin A2 ribozyme binding site
tcaccacatactatggaca

SEQ ID NO: 1466 - DNA, 19 bp, Homo sapiens
  Cyclin A2 ribozyme binding site
ccacatactatggacatgt

SEQ ID NO: 1467 - DNA, 19 bp, Homo sapiens
  Cyclin A2 ribozyme binding site
tggacatgtcaattgtatt

SEQ ID NO: 1468 - DNA, 19 bp, Homo sapiens
  Cyclin A2 ribozyme binding site
catgtcaattgtattagaa

SEQ ID NO: 1469 - DNA, 19 bp, Homo sapiens
  Cyclin A2 ribozyme binding site
caattgtattagaagatga

SEQ ID NO: 1470 - DNA, 19 bp, Homo sapiens
  Cyclin A2 ribozyme binding site
aattgtattagaagatgaa

SEQ ID NO: 1471 - DNA, 19 bp, Homo sapiens
  Cyclin A2 ribozyme binding site
agtgagtgttaatgaagta

SEQ ID NO: 1472 - DNA, 19 bp, Homo sapiens
  Cyclin A2 ribozyme binding site
gtgagtgttaatgaagtac

SEQ ID NO: 1473 - DNA, 19 bp, Homo sapiens
  Cyclin A2 ribozyme binding site
taatgaagtaccagactac

SEQ ID NO: 1474 - DNA, 19 bp, Homo sapiens
  Cyclin A2 ribozyme binding site
taccagactaccatgagga

SEQ ID NO: 1475 - DNA, 19 bp, Homo sapiens
  Cyclin A2 ribozyme binding site
catgaggatattcacacat

SEQ ID NO: 1476 - DNA, 19 bp, Homo sapiens
  Cyclin A2 ribozyme binding site
tgaggatattcacacatac

SEQ ID NO: 1477 - DNA, 19 bp, Homo sapiens
  Cyclin A2 ribozyme binding site
gaggatattcacacatacc

SEQ ID NO: 1478 - DNA, 19 bp, Homo sapiens
  Cyclin A2 ribozyme binding site
ttcacacataccttaggga

SEQ ID NO: 1479 - DNA, 19 bp, Homo sapiens
  Cyclin A2 ribozyme binding site
cacataccttagggaaatg

SEQ ID NO: 1480 - DNA, 19 bp, Homo sapiens
  Cyclin A2 ribozyme binding site
acataccttagggaaatgg

SEQ ID NO: 1481 - DNA, 19 bp, Homo sapiens
  Cyclin A2 ribozyme binding site
aatggaggttaaatgtaaa

SEQ ID NO: 1482 - DNA, 19 bp, Homo sapiens
  Cyclin A2 ribozyme binding site
atggaggttaaatgtaaac

SEQ ID NO: 1483 - DNA, 19 bp, Homo sapiens
  Cyclin A2 ribozyme binding site
gttaaatgtaaacctaaag

SEQ ID NO: 1484 - DNA, 19 bp, Homo sapiens
  Cyclin A2 ribozyme binding site
tgtaaacctaaagtgggtt

SEQ ID NO: 1485 - DNA, 19 bp, Homo sapiens
  Cyclin A2 ribozyme binding site
aaagtgggttacatgaaga

SEQ ID NO: 1486 - DNA, 19 bp, Homo sapiens
  Cyclin A2 ribozyme binding site
aagtgggttacatgaagaa

SEQ ID NO: 1487 - DNA, 19 bp, Homo sapiens
  Cyclin A2 ribozyme binding site
gccagacatcactaacagt

SEQ ID NO: 1488 - DNA, 19 bp, Homo sapiens
  Cyclin A2 ribozyme binding site
gacatcactaacagtatga

SEQ ID NO: 1489 - DNA, 19 bp, Homo sapiens
  Cyclin A2 ribozyme binding site
actaacagtatgagagcta

SEQ ID NO: 1490 - DNA, 19 bp, Homo sapiens
  Cyclin A2 ribozyme binding site
atgagagctatcctcgtgg

SEQ ID NO: 1491 - DNA, 19 bp, Homo sapiens
  Cyclin A2 ribozyme binding site
gagagctatcctcgtggac

SEQ ID NO: 1492 - DNA, 19 bp, Homo sapiens
  Cyclin A2 ribozyme binding site
agctatcctcgtggactgg

SEQ ID NO: 1493 - DNA, 19 bp, Homo sapiens
  Cyclin A2 ribozyme binding site
tggactggttagttgaagt

SEQ ID NO: 1494 - DNA, 19 bp, Homo sapiens
  Cyclin A2 ribozyme binding site
ggactggttagttgaagta

SEQ ID NO: 1495 - DNA, 19 bp, Homo sapiens
  Cyclin A2 ribozyme binding site
ctggttagttgaagtagga

SEQ ID NO: 1496 - DNA, 19 bp, Homo sapiens
  Cyclin A2 ribozyme binding site
agttgaagtaggagaagaa

SEQ ID NO: 1497 - DNA, 19 bp, Homo sapiens
  Cyclin A2 ribozyme binding site
gagaagaatataaactaca

SEQ ID NO: 1498 - DNA, 19 bp, Homo sapiens
  Cyclin A2 ribozyme binding site
gaagaatataaactacaga

SEQ ID NO: 1499 - DNA, 19 bp, Homo sapiens
  Cyclin A2 ribozyme binding site
atataaactacagaatgag

SEQ ID NO: 1500 - DNA, 19 bp, Homo sapiens
  Cyclin A2 ribozyme binding site
accctgcatttggctgtga

SEQ ID NO: 1501 - DNA, 19 bp, Homo sapiens
  Cyclin A2 ribozyme binding site
ccctgcatttggctgtgaa

SEQ ID NO: 1502 - DNA, 19 bp, Homo sapiens
  Cyclin A2 ribozyme binding site
ctgtgaactacattgatag

SEQ ID NO: 1503 - DNA, 19 bp, Homo sapiens
  Cyclin A2 ribozyme binding site
gaactacattgataggttc

SEQ ID NO: 1504 - DNA, 19 bp, Homo sapiens
  Cyclin A2 ribozyme binding site
tacattgataggttcctgt

SEQ ID NO: 1505 - DNA, 19 bp, Homo sapiens
  Cyclin A2 ribozyme binding site
ttgataggttcctgtcttc

SEQ ID NO: 1506 - DNA, 19 bp, Homo sapiens
  Cyclin A2 ribozyme binding site
tgataggttcctgtcttcc

SEQ ID NO: 1507 - DNA, 19 bp, Homo sapiens
  Cyclin A2 ribozyme binding site
ggttcctgtcttccatgtc

SEQ ID NO: 1508 - DNA, 19 bp, Homo sapiens
  Cyclin A2 ribozyme binding site
ttcctgtcttccatgtcag

SEQ ID NO: 1509 - DNA, 19 bp, Homo sapiens
  Cyclin A2 ribozyme binding site
tcctgtcttccatgtcagt

SEQ ID NO: 1510 - DNA, 19 bp, Homo sapiens
  Cyclin A2 ribozyme binding site
cttccatgtcagtgctgag

SEQ ID NO: 1511 - DNA, 19 bp, Homo sapiens
  Cyclin A2 ribozyme binding site
aggaaaacttcagcttgtg

SEQ ID NO: 1512 - DNA, 19 bp, Homo sapiens
  Cyclin A2 ribozyme binding site
ggaaaacttcagcttgtgg

SEQ ID NO: 1513 - DNA, 19 bp, Homo sapiens
  Cyclin A2 ribozyme binding site
acttcagcttgtgggcact

SEQ ID NO: 1514 - DNA, 19 bp, Homo sapiens
  Cyclin A2 ribozyme binding site
actgctgctatgctgttag

SEQ ID NO: 1515 - DNA, 19 bp, Homo sapiens
  Cyclin A2 ribozyme binding site
ctatgctgttagcctcaaa

SEQ ID NO: 1516 - DNA, 19 bp, Homo sapiens
  Cyclin A2 ribozyme binding site
tatgctgttagcctcaaag

SEQ ID NO: 1517 - DNA, 19 bp, Homo sapiens
  Cyclin A2 ribozyme binding site
tgttagcctcaaagtttga

SEQ ID NO: 1518 - DNA, 19 bp, Homo sapiens
  Cyclin A2 ribozyme binding site
cctcaaagtttgaagaaat

SEQ ID NO: 1519 - DNA, 19 bp, Homo sapiens
  Cyclin A2 ribozyme binding site
ctcaaagtttgaagaaata

SEQ ID NO: 1520 - DNA, 19 bp, Homo sapiens
  Cyclin A2 ribozyme binding site
tgaagaaatatacccccca

SEQ ID NO: 1521 - DNA, 19 bp, Homo sapiens
  Cyclin A2 ribozyme binding site
aagaaatataccccccaga

SEQ ID NO: 1522 - DNA, 19 bp, Homo sapiens
  Cyclin A2 ribozyme binding site
cccagaagtagcagagttt

SEQ ID NO: 1523 - DNA, 19 bp, Homo sapiens
  Cyclin A2 ribozyme binding site
tagcagagtttgtgtacat

SEQ ID NO: 1524 - DNA, 19 bp, Homo sapiens
  Cyclin A2 ribozyme binding site
agcagagtttgtgtacatt

SEQ ID NO: 1525 - DNA, 19 bp, Homo sapiens
  Cyclin A2 ribozyme binding site
agtttgtgtacattacaga

SEQ ID NO: 1526 - DNA, 19 bp, Homo sapiens
  Cyclin A2 ribozyme binding site
tgtgtacattacagatgat

SEQ ID NO: 1527 - DNA, 19 bp, Homo sapiens
  Cyclin A2 ribozyme binding site
gtgtacattacagatgata

SEQ ID NO: 1528 - DNA, 19 bp, Homo sapiens
  Cyclin A2 ribozyme binding site
acagatgatacctacacca

SEQ ID NO: 1529 - DNA, 19 bp, Homo sapiens
  Cyclin A2 ribozyme binding site
atgatacctacaccaagaa

SEQ ID NO: 1530 - DNA, 19 bp, Homo sapiens
  Cyclin A2 ribozyme binding site
gaaacaagttctgagaatg

SEQ ID NO: 1531 - DNA, 19 bp, Homo sapiens
  Cyclin A2 ribozyme binding site
atggagcatctagttttga

SEQ ID NO: 1532 - DNA, 19 bp, Homo sapiens
  Cyclin A2 ribozyme binding site
ggagcatctagttttgaaa

SEQ ID NO: 1533 - DNA, 19 bp, Homo sapiens
  Cyclin A2 ribozyme binding site
gcatctagttttgaaagtc

SEQ ID NO: 1534 - DNA, 19 bp, Homo sapiens
  Cyclin A2 ribozyme binding site
catctagttttgaaagtcc

SEQ ID NO: 1535 - DNA, 19 bp, Homo sapiens
  Cyclin A2 ribozyme binding site
atctagttttgaaagtcct

SEQ ID NO: 1536 - DNA, 19 bp, Homo sapiens
  Cyclin A2 ribozyme binding site
tttgaaagtccttactttt

SEQ ID NO: 1537 - DNA, 19 bp, Homo sapiens
  Cyclin A2 ribozyme binding site
gaaagtccttacttttgac

SEQ ID NO: 1538 - DNA, 19 bp, Homo sapiens
  Cyclin A2 ribozyme binding site
aaagtccttacttttgact

SEQ ID NO: 1539 - DNA, 19 bp, Homo sapiens
  Cyclin A2 ribozyme binding site
gtccttacttttgacttag

SEQ ID NO: 1540 - DNA, 19 bp, Homo sapiens
  Cyclin A2 ribozyme binding site
tccttacttttgacttagc

SEQ ID NO: 1541 - DNA, 19 bp, Homo sapiens
  Cyclin A2 ribozyme binding site
ccttacttttgacttagct

SEQ ID NO: 1542 - DNA, 19 bp, Homo sapiens
  Cyclin A2 ribozyme binding site
cttttgacttagctgctcc

SEQ ID NO: 1543 - DNA, 19 bp, Homo sapiens
  Cyclin A2 ribozyme binding site
ttttgacttagctgctcca

SEQ ID NO: 1544 - DNA, 19 bp, Homo sapiens
  Cyclin A2 ribozyme binding site
ttagctgctccaacagtaa

SEQ ID NO: 1545 - DNA, 19 bp, Homo sapiens
  Cyclin A2 ribozyme binding site
tccaacagtaaatcagttt

SEQ ID NO: 1546 - DNA, 19 bp, Homo sapiens
  Cyclin A2 ribozyme binding site
acagtaaatcagtttctta

SEQ ID NO: 1547 - DNA, 19 bp, Homo sapiens
  Cyclin A2 ribozyme binding site
taaatcagtttcttaccca

SEQ ID NO: 1548 - DNA, 19 bp, Homo sapiens
  Cyclin A2 ribozyme binding site
aaatcagtttcttacccaa

SEQ ID NO: 1549 - DNA, 19 bp, Homo sapiens
  Cyclin A2 ribozyme binding site
aatcagtttcttacccaat

SEQ ID NO: 1550 - DNA, 19 bp, Homo sapiens
  Cyclin A2 ribozyme binding site
tcagtttcttacccaatac

SEQ ID NO: 1551 - DNA, 19 bp, Homo sapiens
  Cyclin A2 ribozyme binding site
cagtttcttacccaatact

SEQ ID NO: 1552 - DNA, 19 bp, Homo sapiens
  Cyclin A2 ribozyme binding site
ttacccaatactttctgca

SEQ ID NO: 1553 - DNA, 19 bp, Homo sapiens
  Cyclin A2 ribozyme binding site
cccaatactttctgcatca

SEQ ID NO: 1554 - DNA, 19 bp, Homo sapiens
  Cyclin A2 ribozyme binding site
ccaatactttctgcatcag

SEQ ID NO: 1555 - DNA, 19 bp, Homo sapiens
  Cyclin A2 ribozyme binding site
caatactttctgcatcagc

SEQ ID NO: 1556 - DNA, 19 bp, Homo sapiens
  Cyclin A2 ribozyme binding site
tttctgcatcagcagcctg

SEQ ID NO: 1557 - DNA, 19 bp, Homo sapiens
  Cyclin A2 ribozyme binding site
ctgcaaagttgaaagttta

SEQ ID NO: 1558 - DNA, 19 bp, Homo sapiens
  Cyclin A2 ribozyme binding site
gttgaaagtttagcaatgt

SEQ ID NO: 1559 - DNA, 19 bp, Homo sapiens
  Cyclin A2 ribozyme binding site
ttgaaagtttagcaatgtt

SEQ ID NO: 1560 - DNA, 19 bp, Homo sapiens
  Cyclin A2 ribozyme binding site
tgaaagtttagcaatgttt

SEQ ID NO: 1561 - DNA, 19 bp, Homo sapiens
  Cyclin A2 ribozyme binding site
tagcaatgtttttgggaga

SEQ ID NO: 1562 - DNA, 19 bp, Homo sapiens
  Cyclin A2 ribozyme binding site
agcaatgtttttgggagaa

SEQ ID NO: 1563 - DNA, 19 bp, Homo sapiens
  Cyclin A2 ribozyme binding site
gcaatgtttttgggagaat

SEQ ID NO: 1564 - DNA, 19 bp, Homo sapiens
  Cyclin A2 ribozyme binding site
caatgtttttgggagaatt

SEQ ID NO: 1565 - DNA, 19 bp, Homo sapiens
  Cyclin A2 ribozyme binding site
tgggagaattaagtttgat

SEQ ID NO: 1566 - DNA, 19 bp, Homo sapiens
  Cyclin A2 ribozyme binding site
gggagaattaagtttgata

SEQ ID NO: 1567 - DNA, 19 bp, Homo sapiens
  Cyclin A2 ribozyme binding site
gaattaagtttgatagatg

SEQ ID NO: 1568 - DNA, 19 bp, Homo sapiens
  Cyclin A2 ribozyme binding site
aattaagtttgatagatgc

SEQ ID NO: 1569 - DNA, 19 bp, Homo sapiens
  Cyclin A2 ribozyme binding site
aagtttgatagatgctgac

SEQ ID NO: 1570 - DNA, 19 bp, Homo sapiens
  Cyclin A2 ribozyme binding site
ctgacccatacctcaagta

SEQ ID NO: 1571 - DNA, 19 bp, Homo sapiens
  Cyclin A2 ribozyme binding site
cccatacctcaagtatttg

SEQ ID NO: 1572 - DNA, 19 bp, Homo sapiens
  Cyclin A2 ribozyme binding site
acctcaagtatttgccatc

SEQ ID NO: 1573 - DNA, 19 bp, Homo sapiens
  Cyclin A2 ribozyme binding site
ctcaagtatttgccatcag

SEQ ID NO: 1574 - DNA, 19 bp, Homo sapiens
  Cyclin A2 ribozyme binding site
tcaagtatttgccatcagt

SEQ ID NO: 1575 - DNA, 19 bp, Homo sapiens
  Cyclin A2 ribozyme binding site
atttgccatcagttattgc

SEQ ID NO: 1576 - DNA, 19 bp, Homo sapiens
  Cyclin A2 ribozyme binding site
gccatcagttattgctgga

SEQ ID NO: 1577 - DNA, 19 bp, Homo sapiens
  Cyclin A2 ribozyme binding site
ccatcagttattgctggag

SEQ ID NO: 1578 - DNA, 19 bp, Homo sapiens
  Cyclin A2 ribozyme binding site
atcagttattgctggagct

SEQ ID NO: 1579 - DNA, 19 bp, Homo sapiens
  Cyclin A2 ribozyme binding site
gagctgcctttcatttagc

SEQ ID NO: 1580 - DNA, 19 bp, Homo sapiens
  Cyclin A2 ribozyme binding site
agctgcctttcatttagca

SEQ ID NO: 1581 - DNA, 19 bp, Homo sapiens
  Cyclin A2 ribozyme binding site
gctgcctttcatttagcac

SEQ ID NO: 1582 - DNA, 19 bp, Homo sapiens
  Cyclin A2 ribozyme binding site
gcctttcatttagcactct

SEQ ID NO: 1583 - DNA, 19 bp, Homo sapiens
  Cyclin A2 ribozyme binding site
cctttcatttagcactcta

SEQ ID NO: 1584 - DNA, 19 bp, Homo sapiens
  Cyclin A2 ribozyme binding site
ctttcatttagcactctac

SEQ ID NO: 1585 - DNA, 19 bp, Homo sapiens
  Cyclin A2 ribozyme binding site
tttagcactctacacagtc

SEQ ID NO: 1586 - DNA, 19 bp, Homo sapiens
  Cyclin A2 ribozyme binding site
tagcactctacacagtcac

SEQ ID NO: 1587 - DNA, 19 bp, Homo sapiens
  Cyclin A2 ribozyme binding site
ctacacagtcacgggacaa

SEQ ID NO: 1588 - DNA, 19 bp, Homo sapiens
  Cyclin A2 ribozyme binding site
ggcctgaatcattaatacg

SEQ ID NO: 1589 - DNA, 19 bp, Homo sapiens
  Cyclin A2 ribozyme binding site
ctgaatcattaatacgaaa

SEQ ID NO: 1590 - DNA, 19 bp, Homo sapiens
  Cyclin A2 ribozyme binding site
atcattaatacgaaagact

SEQ ID NO: 1591 - DNA, 19 bp, Homo sapiens
  Cyclin A2 ribozyme binding site
agactggatataccctgga

SEQ ID NO: 1592 - DNA, 19 bp, Homo sapiens
  Cyclin A2 ribozyme binding site
actggatataccctggaaa

SEQ ID NO: 1593 - DNA, 19 bp, Homo sapiens
  Cyclin A2 ribozyme binding site
ctggaaagtcttaagcctt

SEQ ID NO: 1594 - DNA, 19 bp, Homo sapiens
  Cyclin A2 ribozyme binding site
ggaaagtcttaagccttgt

SEQ ID NO: 1595 - DNA, 19 bp, Homo sapiens
  Cyclin A2 ribozyme binding site
gaaagtcttaagccttgtc

SEQ ID NO: 1596 - DNA, 19 bp, Homo sapiens
  Cyclin A2 ribozyme binding site
cttaagccttgtctcatgg

SEQ ID NO: 1597 - DNA, 19 bp, Homo sapiens
  Cyclin A2 ribozyme binding site
aagccttgtctcatggacc

SEQ ID NO: 1598 - DNA, 19 bp, Homo sapiens
  Cyclin A2 ribozyme binding site
gccttgtctcatggacctt

SEQ ID NO: 1599 - DNA, 19 bp, Homo sapiens
  Cyclin A2 ribozyme binding site
catggaccttcaccagacc

SEQ ID NO: 1600 - DNA, 19 bp, Homo sapiens
  Cyclin A2 ribozyme binding site
atggaccttcaccagacct

SEQ ID NO: 1601 - DNA, 19 bp, Homo sapiens
  Cyclin A2 ribozyme binding site
accagacctacctcaaagc

SEQ ID NO: 1602 - DNA, 19 bp, Homo sapiens
  Cyclin A2 ribozyme binding site
gacctacctcaaagcacca

SEQ ID NO: 1603 - DNA, 19 bp, Homo sapiens
  Cyclin A2 ribozyme binding site
cacaacagtcaataagaga

SEQ ID NO: 1604 - DNA, 19 bp, Homo sapiens
  Cyclin A2 ribozyme binding site
acagtcaataagagaaaag

SEQ ID NO: 1605 - DNA, 19 bp, Homo sapiens
  Cyclin A2 ribozyme binding site
gagaaaagtacaaaaattc

SEQ ID NO: 1606 - DNA, 19 bp, Homo sapiens
  Cyclin A2 ribozyme binding site
tacaaaaattcaaagtatc

SEQ ID NO: 1607 - DNA, 19 bp, Homo sapiens
  Cyclin A2 ribozyme binding site
acaaaaattcaaagtatca

SEQ ID NO: 1608 - DNA, 19 bp, Homo sapiens
  Cyclin A2 ribozyme binding site
attcaaagtatcatggtgt

SEQ ID NO: 1609 - DNA, 19 bp, Homo sapiens
  Cyclin A2 ribozyme binding site
tcaaagtatcatggtgttt

SEQ ID NO: 1610 - DNA, 19 bp, Homo sapiens
  Cyclin A2 ribozyme binding site
tcatggtgtttctctcctc

SEQ ID NO: 1611 - DNA, 19 bp, Homo sapiens
  Cyclin A2 ribozyme binding site
catggtgtttctctcctca

SEQ ID NO: 1612 - DNA, 19 bp, Homo sapiens
  Cyclin A2 ribozyme binding site
atggtgtttctctcctcaa

SEQ ID NO: 1613 - DNA, 19 bp, Homo sapiens
  Cyclin A2 ribozyme binding site
gtgtttctctcctcaaccc

SEQ ID NO: 1614 - DNA, 19 bp, Homo sapiens
  Cyclin A2 ribozyme binding site
ttctctcctcaacccacca

SEQ ID NO: 1615 - DNA, 19 bp, Homo sapiens
  Cyclin C ribozyme binding site
atggtcgctccgcggccgc

SEQ ID NO: 1616 - DNA, 19 bp, Homo sapiens
  Cyclin C ribozyme binding site
gcggccgctccgccgcgtg

SEQ ID NO: 1617 - DNA, 19 bp, Homo sapiens
  Cyclin C ribozyme binding site
cgtggtgcttttttatcag

SEQ ID NO: 1618 - DNA, 19 bp, Homo sapiens
  Cyclin C ribozyme binding site
gtggtgcttttttatcagg

SEQ ID NO: 1619 - DNA, 19 bp, Homo sapiens
  Cyclin C ribozyme binding site
tggtgcttttttatcaggg

SEQ ID NO: 1620 - DNA, 19 bp, Homo sapiens
  Cyclin C ribozyme binding site
ggtgcttttttatcagggc

SEQ ID NO: 1621 - DNA, 19 bp, Homo sapiens
  Cyclin C ribozyme binding site
gtgcttttttatcagggca

SEQ ID NO: 1622 - DNA, 19 bp, Homo sapiens
  Cyclin C ribozyme binding site
tgcttttttatcagggcaa

SEQ ID NO: 1623 - DNA, 19 bp, Homo sapiens
  Cyclin C ribozyme binding site
cttttttatcagggcaagc

SEQ ID NO: 1624 - DNA, 19 bp, Homo sapiens
  Cyclin C ribozyme binding site
aagctgtgttccatggcag

SEQ ID NO: 1625 - DNA, 19 bp, Homo sapiens
  Cyclin C ribozyme binding site
agctgtgttccatggcagg

SEQ ID NO: 1626 - DNA, 19 bp, Homo sapiens
  Cyclin C ribozyme binding site
cagggaacttttggcagag

SEQ ID NO: 1627 - DNA, 19 bp, Homo sapiens
  Cyclin C ribozyme binding site
agggaacttttggcagagc

SEQ ID NO: 1628 - DNA, 19 bp, Homo sapiens
  Cyclin C ribozyme binding site
gggaacttttggcagagct

SEQ ID NO: 1629 - DNA, 19 bp, Homo sapiens
  Cyclin C ribozyme binding site
ggcagagctcccactattt

SEQ ID NO: 1630 - DNA, 19 bp, Homo sapiens
  Cyclin C ribozyme binding site
gctcccactatttgcaatg

SEQ ID NO: 1631 - DNA, 19 bp, Homo sapiens
  Cyclin C ribozyme binding site
tcccactatttgcaatgga

SEQ ID NO: 1632 - DNA, 19 bp, Homo sapiens
  Cyclin C ribozyme binding site
cccactatttgcaatggat

SEQ ID NO: 1633 - DNA, 19 bp, Homo sapiens
  Cyclin C ribozyme binding site
gcaatggattttggataaa

SEQ ID NO: 1634 - DNA, 19 bp, Homo sapiens
  Cyclin C ribozyme binding site
caatggattttggataaac

SEQ ID NO: 1635 - DNA, 19 bp, Homo sapiens
  Cyclin C ribozyme binding site
aatggattttggataaaca

SEQ ID NO: 1636 - DNA, 19 bp, Homo sapiens
  Cyclin C ribozyme binding site
attttggataaacaagatc

SEQ ID NO: 1637 - DNA, 19 bp, Homo sapiens
  Cyclin C ribozyme binding site
aaacaagatctgttgaagg

SEQ ID NO: 1638 - DNA, 19 bp, Homo sapiens
  Cyclin C ribozyme binding site
aagatctgtggaaggagcg

SEQ ID NO: 1639 - DNA, 19 bp, Homo sapiens
  Cyclin C ribozyme binding site
caaaaggatttaaagtttc

SEQ ID NO: 1640 - DNA, 19 bp, Homo sapiens
  Cyclin C ribozyme binding site
aaaaggatttaaagtttct

SEQ ID NO: 1641 - DNA, 19 bp, Homo sapiens
  Cyclin C ribozyme binding site
aaaggatttaaagtttctc

SEQ ID NO: 1642 - DNA, 19 bp, Homo sapiens
  Cyclin C ribozyme binding site
atttaaagtttctctcaga

SEQ ID NO: 1643 - DNA, 19 bp, Homo sapiens
  Cyclin C ribozyme binding site
tttaaagtttctctcagag

SEQ ID NO: 1644 - DNA, 19 bp, Homo sapiens
  Cyclin C ribozyme binding site
ttaaagtttctctcagagg

SEQ ID NO: 1645 - DNA, 19 bp, Homo sapiens
  Cyclin C ribozyme binding site
aaagtttctctcagaggaa

SEQ ID NO: 1646 - DNA, 19 bp, Homo sapiens
  Cyclin C ribozyme binding site
agtttctctcagaggaaga

SEQ ID NO: 1647 - DNA, 19 bp, Homo sapiens
  Cyclin C ribozyme binding site
aggaagaatattggaagtt

SEQ ID NO: 1648 - DNA, 19 bp, Homo sapiens
  Cyclin C ribozyme binding site
gaagaatattggaagttac

SEQ ID NO: 1649 - DNA, 19 bp, Homo sapiens
  Cyclin C ribozyme binding site
attggaagttacaaatatt

SEQ ID NO: 1650 - DNA, 19 bp, Homo sapiens
  Cyclin C ribozyme binding site
ttggaagttacaaatattt

SEQ ID NO: 1651 - DNA, 19 bp, Homo sapiens
  Cyclin C ribozyme binding site
gttacaaatattttttaca

SEQ ID NO: 1652 - DNA, 19 bp, Homo sapiens
  Cyclin C ribozyme binding site
tacaaatattttttacaaa

SEQ ID NO: 1653 - DNA, 19 bp, Homo sapiens
  Cyclin C ribozyme binding site
acaaatattttttacaaat

SEQ ID NO: 1654 - DNA, 19 bp, Homo sapiens
  Cyclin C ribozyme binding site
caaatattttttacaaatg

SEQ ID NO: 1655 - DNA, 19 bp, Homo sapiens
  Cyclin C ribozyme binding site
aaatattttttacaaatgt

SEQ ID NO: 1656 - DNA, 19 bp, Homo sapiens
  Cyclin C ribozyme binding site
aatattttttacaaatgtt

SEQ ID NO: 1657 - DNA, 19 bp, Homo sapiens
  Cyclin C ribozyme binding site
atattttttacaaatgtta

SEQ ID NO: 1658 - DNA, 19 bp, Homo sapiens
  Cyclin C ribozyme binding site
tacaaatgttatccaagca

SEQ ID NO: 1659 - DNA, 19 bp, Homo sapiens
  Cyclin C ribozyme binding site
acaaatgttatccaagcat

SEQ ID NO: 1660 - DNA, 19 bp, Homo sapiens
  Cyclin C ribozyme binding site
aaatgttatccaagcatta

SEQ ID NO: 1661 - DNA, 19 bp, Homo sapiens
  Cyclin C ribozyme binding site
tccaagcattaggtgaaca

SEQ ID NO: 1662 - DNA, 19 bp, Homo sapiens
  Cyclin C ribozyme binding site
ccaagcattaggtgaacat

SEQ ID NO: 1663 - DNA, 19 bp, Homo sapiens
  Cyclin C ribozyme binding site
ggtgaacatcttaaattaa

SEQ ID NO: 1664 - DNA, 19 bp, Homo sapiens
  Cyclin C ribozyme binding site
tgaacatcttaaattaaga

SEQ ID NO: 1665 - DNA, 19 bp, Homo sapiens
  Cyclin C ribozyme binding site
gaacatcttaaattaagac

SEQ ID NO: 1666 - DNA, 19 bp, Homo sapiens
  Cyclin C ribozyme binding site
atcttaaattaagacaaca

SEQ ID NO: 1667 - DNA, 19 bp, Homo sapiens
  Cyclin C ribozyme binding site
tcttaaattaagacaacaa

SEQ ID NO: 1668 - DNA, 19 bp, Homo sapiens
  Cyclin C ribozyme binding site
acaacaagttattgccact

SEQ ID NO: 1669 - DNA, 19 bp, Homo sapiens
  Cyclin C ribozyme binding site
caacaagttattgccactg

SEQ ID NO: 1670 - DNA, 19 bp, Homo sapiens
  Cyclin C ribozyme binding site
acaagttattgccactgct

SEQ ID NO: 1671 - DNA, 19 bp, Homo sapiens
  Cyclin C ribozyme binding site
gccactgctacggtatatt

SEQ ID NO: 1672 - DNA, 19 bp, Homo sapiens
  Cyclin C ribozyme binding site
tgctacggtatatttcaag

SEQ ID NO: 1673 - DNA, 19 bp, Homo sapiens
  Cyclin C ribozyme binding site
ctacggtatatttcaagag

SEQ ID NO: 1674 - DNA, 19 bp, Homo sapiens
  Cyclin C ribozyme binding site
acggtatatttcaagagat

SEQ ID NO: 1675 - DNA, 19 bp, Homo sapiens
  Cyclin C ribozyme binding site
cggtatatttcaagagatt

SEQ ID NO: 1676 - DNA, 19 bp, Homo sapiens
  Cyclin C ribozyme binding site
tcaagagattctatgccag

SEQ ID NO: 1677 - DNA, 19 bp, Homo sapiens
  Cyclin C ribozyme binding site
caagagattctatgccagg

SEQ ID NO: 1678 - DNA, 19 bp, Homo sapiens
  Cyclin C ribozyme binding site
agagattctatgccaggta

SEQ ID NO: 1679 - DNA, 19 bp, Homo sapiens
  Cyclin C ribozyme binding site
atgccaggtattctctgaa

SEQ ID NO: 1680 - DNA, 19 bp, Homo sapiens
  Cyclin C ribozyme binding site
gccaggtattctctgaaaa

SEQ ID NO: 1681 - DNA, 19 bp, Homo sapiens
  Cyclin C ribozyme binding site
ccaggtattctctgaaaag

SEQ ID NO: 1682 - DNA, 19 bp, Homo sapiens
  Cyclin C ribozyme binding site
aggtattctctgaaaagta

SEQ ID NO: 1683 - DNA, 19 bp, Homo sapiens
  Cyclin C ribozyme binding site
ctgaaaagtatagatcctg

SEQ ID NO: 1684 - DNA, 19 bp, Homo sapiens
  Cyclin C ribozyme binding site
gaaaagtatagatcctgta

SEQ ID NO: 1685 - DNA, 19 bp, Homo sapiens
  Cyclin C ribozyme binding site
agtatagatcctgtattaa

SEQ ID NO: 1686 - DNA, 19 bp, Homo sapiens
  Cyclin C ribozyme binding site
agatcctgtattaatggct

SEQ ID NO: 1687 - DNA, 19 bp, Homo sapiens
  Cyclin C ribozyme binding site
atcctgtattaatggctcc

SEQ ID NO: 1688 - DNA, 19 bp, Homo sapiens
  Cyclin C ribozyme binding site
tcctgtattaatggctcct

SEQ ID NO: 1689 - DNA, 19 bp, Homo sapiens
  Cyclin C ribozyme binding site
ttaatggctcctacatgtg

SEQ ID NO: 1690 - DNA, 19 bp, Homo sapiens
  Cyclin C ribozyme binding site
atggctcctacatgtgtgt

SEQ ID NO: 1691 - DNA, 19 bp, Homo sapiens
  Cyclin C ribozyme binding site
catgtgtgtttttggcatc

SEQ ID NO: 1692 - DNA, 19 bp, Homo sapiens
  Cyclin C ribozyme binding site
atgtgtgtttttggcatcc

SEQ ID NO: 1693 - DNA, 19 bp, Homo sapiens
  Cyclin C ribozyme binding site
tgtgtgtttttggcatcca

SEQ ID NO: 1694 - DNA, 19 bp, Homo sapiens
  Cyclin C ribozyme binding site
gtgtgtttttggcatccaa

SEQ ID NO: 1695 - DNA, 19 bp, Homo sapiens
  Cyclin C ribozyme binding site
ttttggcatccaaagtaga

SEQ ID NO: 1696 - DNA, 19 bp, Homo sapiens
  Cyclin C ribozyme binding site
atccaaagtagaggaattt

SEQ ID NO: 1697 - DNA, 19 bp, Homo sapiens
  Cyclin C ribozyme binding site
tagaggaatttggagtagt

SEQ ID NO: 1698 - DNA, 19 bp, Homo sapiens
  Cyclin C ribozyme binding site
agaggaatttggagtagtt

SEQ ID NO: 1699 - DNA, 19 bp, Homo sapiens
  Cyclin C ribozyme binding site
atttggagtagtttcaaat

SEQ ID NO: 1700 - DNA, 19 bp, Homo sapiens
  Cyclin C ribozyme binding site
tggagtagtttcaaataca

SEQ ID NO: 1701 - DNA, 19 bp, Homo sapiens
  Cyclin C ribozyme binding site
ggagtagtttcaaatacaa

SEQ ID NO: 1702 - DNA, 19 bp, Homo sapiens
  Cyclin C ribozyme binding site
gagtagtttcaaatacaag

SEQ ID NO: 1703 - DNA, 19 bp, Homo sapiens
  Cyclin C ribozyme binding site
gtttcaaatacaagattga

SEQ ID NO: 1704 - DNA, 19 bp, Homo sapiens
  Cyclin C ribozyme binding site
atacaagattgattgctgc

SEQ ID NO: 1705 - DNA, 19 bp, Homo sapiens
  Cyclin C ribozyme binding site
aagattgattgctgctgct

SEQ ID NO: 1706 - DNA, 19 bp, Homo sapiens
  Cyclin C ribozyme binding site
gctgctgctacttctgtat

SEQ ID NO: 1707 - DNA, 19 bp, Homo sapiens
  Cyclin C ribozyme binding site
gctgctacttctgtattaa

SEQ ID NO: 1708 - DNA, 19 bp, Homo sapiens
  Cyclin C ribozyme binding site
ctgctacttctgtattaaa

SEQ ID NO: 1709 - DNA, 19 bp, Homo sapiens
  Cyclin C ribozyme binding site
tacttctgtattaaaaact

SEQ ID NO: 1710 - DNA, 19 bp, Homo sapiens
  Cyclin C ribozyme binding site
cttctgtattaaaaactag

SEQ ID NO: 1711 - DNA, 19 bp, Homo sapiens
  Cyclin C ribozyme binding site
ttctgtattaaaaactaga

SEQ ID NO: 1712 - DNA, 19 bp, Homo sapiens
  Cyclin C ribozyme binding site
ttaaaaactagattttcat

SEQ ID NO: 1713 - DNA, 19 bp, Homo sapiens
  Cyclin C ribozyme binding site
aaactagattttcatatgc

SEQ ID NO: 1714 - DNA, 19 bp, Homo sapiens
  Cyclin C ribozyme binding site
aactagattttcatatgcc

SEQ ID NO: 1715 - DNA, 19 bp, Homo sapiens
  Cyclin C ribozyme binding site
actagattttcatatgcct

SEQ ID NO: 1716 - DNA, 19 bp, Homo sapiens
  Cyclin C ribozyme binding site
ctagattttcatatgcctt

SEQ ID NO: 1717 - DNA, 19 bp, Homo sapiens
  Cyclin C ribozyme binding site
gattttcatatgcctttcc

SEQ ID NO: 1718 - DNA, 19 bp, Homo sapiens
  Cyclin C ribozyme binding site
catatgcctttccaaagga

SEQ ID NO: 1719 - DNA, 19 bp, Homo sapiens
  Cyclin C ribozyme binding site
atatgcctttccaaaggaa

SEQ ID NO: 1720 - DNA, 19 bp, Homo sapiens
  Cyclin C ribozyme binding site
tatgcctttccaaaggaat

SEQ ID NO: 1721 - DNA, 19 bp, Homo sapiens
  Cyclin C ribozyme binding site
caaaggaatttccttatag

SEQ ID NO: 1722 - DNA, 19 bp, Homo sapiens
  Cyclin C ribozyme binding site
aaaggaatttccttatagg

SEQ ID NO: 1723 - DNA, 19 bp, Homo sapiens
  Cyclin C ribozyme binding site
aaggaatttccttatagga

SEQ ID NO: 1724 - DNA, 19 bp, Homo sapiens
  Cyclin C ribozyme binding site
gaatttccttataggatga

SEQ ID NO: 1725 - DNA, 19 bp, Homo sapiens
  Cyclin C ribozyme binding site
aatttccttataggatgaa

SEQ ID NO: 1726 - DNA, 19 bp, Homo sapiens
  Cyclin C ribozyme binding site
tttccttataggatgaatc

SEQ ID NO: 1727 - DNA, 19 bp, Homo sapiens
  Cyclin C ribozyme binding site
aggatgaatcatatattag

SEQ ID NO: 1728 - DNA, 19 bp, Homo sapiens
  Cyclin C ribozyme binding site
atgaatcatatattagaat

SEQ ID NO: 1729 - DNA, 19 bp, Homo sapiens
  Cyclin C ribozyme binding site
gaatcatatattagaatgt

SEQ ID NO: 1730 - DNA, 19 bp, Homo sapiens
  Cyclin C ribozyme binding site
atcatatattagaatgtga

SEQ ID NO: 1731 - DNA, 19 bp, Homo sapiens
  Cyclin C ribozyme binding site
tcatatattagaatgtgaa

SEQ ID NO: 1732 - DNA, 19 bp, Homo sapiens
  Cyclin C ribozyme binding site
aatgtgaattctatctgtt

SEQ ID NO: 1733 - DNA, 19 bp, Homo sapiens
  Cyclin C ribozyme binding site
atgtgaattctatctgtta

SEQ ID NO: 1734 - DNA, 19 bp, Homo sapiens
  Cyclin C ribozyme binding site
gtgaattctatctgttaga

SEQ ID NO: 1735 - DNA, 19 bp, Homo sapiens
  Cyclin C ribozyme binding site
gaattctatctgttagaac

SEQ ID NO: 1736 - DNA, 19 bp, Homo sapiens
  Cyclin C ribozyme binding site
tctatctgttagaactaat

SEQ ID NO: 1737 - DNA, 19 bp, Homo sapiens
  Cyclin C ribozyme binding site
ctatctgttagaactaatg

SEQ ID NO: 1738 - DNA, 19 bp, Homo sapiens
  Cyclin C ribozyme binding site
gttagaactaatggattgt

SEQ ID NO: 1739 - DNA, 19 bp, Homo sapiens
  Cyclin C ribozyme binding site
ctaatggattgttgcttga

SEQ ID NO: 1740 - DNA, 19 bp, Homo sapiens
  Cyclin C ribozyme binding site
atggattgttgcttgatag

SEQ ID NO: 1741 - DNA, 19 bp, Homo sapiens
  Cyclin C ribozyme binding site
attgttgcttgatagtgta

SEQ ID NO: 1742 - DNA, 19 bp, Homo sapiens
  Cyclin C ribozyme binding site
ttgcttgatagtgtatcat

SEQ ID NO: 1743 - DNA, 19 bp, Homo sapiens
  Cyclin C ribozyme binding site
tgatagtgtatcatcctta

SEQ ID NO: 1744 - DNA, 19 bp, Homo sapiens
  Cyclin C ribozyme binding site
atagtgtatcatccttata

SEQ ID NO: 1745 - DNA, 19 bp, Homo sapiens
  Cyclin C ribozyme binding site
gtgtatcatccttatagac

SEQ ID NO: 1746 - DNA, 19 bp, Homo sapiens
  Cyclin C ribozyme binding site
tatcatccttatagacctt

SEQ ID NO: 1747 - DNA, 19 bp, Homo sapiens
  Cyclin C ribozyme binding site
atcatccttatagaccttt

SEQ ID NO: 1748 - DNA, 19 bp, Homo sapiens
  Cyclin C ribozyme binding site
catccttatagacctttgc

SEQ ID NO: 1749 - DNA, 19 bp, Homo sapiens
  Cyclin C ribozyme binding site
tatagacctttgctccagt

SEQ ID NO: 1750 - DNA, 19 bp, Homo sapiens
  Cyclin C ribozyme binding site
atagacctttgctccagta

SEQ ID NO: 1751 - DNA, 19 bp, Homo sapiens
  Cyclin C ribozyme binding site
acctttgctccagtatgtg

SEQ ID NO: 1752 - DNA, 19 bp, Homo sapiens
  Cyclin C ribozyme binding site
tgctccagtatgtgcagga

SEQ ID NO: 1753 - DNA, 19 bp, Homo sapiens
  Cyclin C ribozyme binding site
aagacatgttgcttcccct

SEQ ID NO: 1754 - DNA, 19 bp, Homo sapiens
  Cyclin C ribozyme binding site
catgttgcttccccttgca

SEQ ID NO: 1755 - DNA, 19 bp, Homo sapiens
  Cyclin C ribozyme binding site
atgttgcttccccttgcat

SEQ ID NO: 1756 - DNA, 19 bp, Homo sapiens
  Cyclin C ribozyme binding site
gcttccccttgcatggagg

SEQ ID NO: 1757 - DNA, 19 bp, Homo sapiens
  Cyclin C ribozyme binding site
atggaggatagtgaatgat

SEQ ID NO: 1758 - DNA, 19 bp, Homo sapiens
  Cyclin C ribozyme binding site
gtgaatgatacctacagaa

SEQ ID NO: 1759 - DNA, 19 bp, Homo sapiens
  Cyclin C ribozyme binding site
atgatacctacagaacgga

SEQ ID NO: 1760 - DNA, 19 bp, Homo sapiens
  Cyclin C ribozyme binding site
agaacggatctttgcctac

SEQ ID NO: 1761 - DNA, 19 bp, Homo sapiens
  Cyclin C ribozyme binding site
aacggatctttgcctactg

SEQ ID NO: 1762 - DNA, 19 bp, Homo sapiens
  Cyclin C ribozyme binding site
acggatctttgcctactgt

SEQ ID NO: 1763 - DNA, 19 bp, Homo sapiens
  Cyclin C ribozyme binding site
tctttgcctactgtatcct

SEQ ID NO: 1764 - DNA, 19 bp, Homo sapiens
  Cyclin C ribozyme binding site
gcctactgtatcctccttt

SEQ ID NO: 1765 - DNA, 19 bp, Homo sapiens
  Cyclin C ribozyme binding site
ctactgtatcctcctttca

SEQ ID NO: 1766 - DNA, 19 bp, Homo sapiens
  Cyclin C ribozyme binding site
ctgtatcctcctttcatga

SEQ ID NO: 1767 - DNA, 19 bp, Homo sapiens
  Cyclin C ribozyme binding site
tatcctcctttcatgatag

SEQ ID NO: 1768 - DNA, 19 bp, Homo sapiens
  Cyclin C ribozyme binding site
atcctcctttcatgatagc

SEQ ID NO: 1769 - DNA, 19 bp, Homo sapiens
  Cyclin C ribozyme binding site
tcctcctttcatgatagct

SEQ ID NO: 1770 - DNA, 19 bp, Homo sapiens
  Cyclin C ribozyme binding site
tttcatgatagctttagct

SEQ ID NO: 1771 - DNA, 19 bp, Homo sapiens
  Cyclin C ribozyme binding site
atgatagctttagcttgcc

SEQ ID NO: 1772 - DNA, 19 bp, Homo sapiens
  Cyclin C ribozyme binding site
tgatagctttagcttgcct

SEQ ID NO: 1773 - DNA, 19 bp, Homo sapiens
  Cyclin C ribozyme binding site
gatagctttagcttgccta

SEQ ID NO: 1774 - DNA, 19 bp, Homo sapiens
  Cyclin C ribozyme binding site
gctttagcttgcctacatg

SEQ ID NO: 1775 - DNA, 19 bp, Homo sapiens
  Cyclin C ribozyme binding site
agcttgcctacatgtagcc

SEQ ID NO: 1776 - DNA, 19 bp, Homo sapiens
  Cyclin C ribozyme binding site
cctacatgtagcctgtgtt

SEQ ID NO: 1777 - DNA, 19 bp, Homo sapiens
  Cyclin C ribozyme binding site
agcctgtgttgtacagcag

SEQ ID NO: 1778 - DNA, 19 bp, Homo sapiens
  Cyclin C ribozyme binding site
ctgtgttgtacagcagaaa

SEQ ID NO: 1779 - DNA, 19 bp, Homo sapiens
  Cyclin C ribozyme binding site
ggcaatggtttgctgagct

SEQ ID NO: 1780 - DNA, 19 bp, Homo sapiens
  Cyclin C ribozyme binding site
gcaatggtttgctgagctt

SEQ ID NO: 1781 - DNA, 19 bp, Homo sapiens
  Cyclin C ribozyme binding site
tgctgagctttctgtggat

SEQ ID NO: 1782 - DNA, 19 bp, Homo sapiens
  Cyclin C ribozyme binding site
gctgagctttctgtggata

SEQ ID NO: 1783 - DNA, 19 bp, Homo sapiens
  Cyclin C ribozyme binding site
tctgtggatatggaaaaga

SEQ ID NO: 1784 - DNA, 19 bp, Homo sapiens
  Cyclin C ribozyme binding site
ggaaaagattttggaaata

SEQ ID NO: 1785 - DNA, 19 bp, Homo sapiens
  Cyclin C ribozyme binding site
gaaaagattttggaaataa

SEQ ID NO: 1786 - DNA, 19 bp, Homo sapiens
  Cyclin C ribozyme binding site
aaaagattttggaaataat

SEQ ID NO: 1787 - DNA, 19 bp, Homo sapiens
  Cyclin C ribozyme binding site
tttggaaataatcagggtt

SEQ ID NO: 1788 - DNA, 19 bp, Homo sapiens
  Cyclin C ribozyme binding site
ggaaataatcagggttatt

SEQ ID NO: 1789 - DNA, 19 bp, Homo sapiens
  Cyclin C ribozyme binding site
aatcagggttattttaaaa

SEQ ID NO: 1790 - DNA, 19 bp, Homo sapiens
  Cyclin C ribozyme binding site
atcagggttattttaaaac

SEQ ID NO: 1791 - DNA, 19 bp, Homo sapiens
  Cyclin C ribozyme binding site
cagggttattttaaaacta

SEQ ID NO: 1792 - DNA, 19 bp, Homo sapiens
  Cyclin C ribozyme binding site
agggttattttaaaactat

SEQ ID NO: 1793 - DNA, 19 bp, Homo sapiens
  Cyclin C ribozyme binding site
gggttattttaaaactata

SEQ ID NO: 1794 - DNA, 19 bp, Homo sapiens
  Cyclin C ribozyme binding site
ggttattttaaaactatat

SEQ ID NO: 1795 - DNA, 19 bp, Homo sapiens
  Cyclin C ribozyme binding site
tttaaaactatatgagcag

SEQ ID NO: 1796 - DNA, 19 bp, Homo sapiens
  Cyclin C ribozyme binding site
taaaactatatgagcagtg

SEQ ID NO: 1797 - DNA, 19 bp, Homo sapiens
  Cyclin C ribozyme binding site
tggaagaatttcgatgaga

SEQ ID NO: 1798 - DNA, 19 bp, Homo sapiens
  Cyclin C ribozyme binding site
ggaagaatttcgatgagag

SEQ ID NO: 1799 - DNA, 19 bp, Homo sapiens
  Cyclin C ribozyme binding site
gaagaatttcgatgagaga

SEQ ID NO: 1800 - DNA, 19 bp, Homo sapiens
  Cyclin C ribozyme binding site
ggcaaccattcttagtaag

SEQ ID NO: 1801 - DNA, 19 bp, Homo sapiens
  Cyclin C ribozyme binding site
gcaaccattcttagtaaga

SEQ ID NO: 1802 - DNA, 19 bp, Homo sapiens
  Cyclin C ribozyme binding site
aaccattcttagtaagatg

SEQ ID NO: 1803 - DNA, 19 bp, Homo sapiens
  Cyclin C ribozyme binding site
accattcttagtaagatgc

SEQ ID NO: 1804 - DNA, 19 bp, Homo sapiens
  Cyclin C ribozyme binding site
attcttagtaagatgccaa

SEQ ID NO: 1805 - DNA, 19 bp, Homo sapiens
  Cyclin C ribozyme binding site
aaaccacctccaaacagtg

SEQ ID NO: 1806 - DNA, 19 bp, Homo sapiens
  Cyclin C ribozyme binding site
gagcagggtccaaatggaa

SEQ ID NO: 1807 - DNA, 19 bp, Homo sapiens
  Cyclin C ribozyme binding site
aatggaagtcagaactcta

SEQ ID NO: 1808 - DNA, 19 bp, Homo sapiens
  Cyclin C ribozyme binding site
gtcagaactctagctacag

SEQ ID NO: 1809 - DNA, 19 bp, Homo sapiens
  Cyclin C ribozyme binding site
cagaactctagctacagcc

SEQ ID NO: 1810 - DNA, 19 bp, Homo sapiens
  Cyclin C ribozyme binding site
actctagctacagccaatc

SEQ ID NO: 1811 - DNA, 19 bp, Homo sapiens
  Cyclin C ribozyme binding site
acagccaatcttaaaacat

SEQ ID NO: 1812 - DNA, 19 bp, Homo sapiens
  Cyclin C ribozyme binding site
agccaatcttaaaacattc

SEQ ID NO: 1813 - DNA, 19 bp, Homo sapiens
  Cyclin C ribozyme binding site
gccaatcttaaaacattcc

SEQ ID NO: 1814 - DNA, 19 bp, Homo sapiens
  Cyclin C ribozyme binding site
ttaaaacattccgaagaat

SEQ ID NO: 1815 - DNA, 19 bp, Homo sapiens
  Cyclin C ribozyme binding site
taaaacattccgaagaatt

SEQ ID NO: 1816 - DNA, 19 bp, Homo sapiens
  Cyclin C ribozyme binding site
ccgaagaattccatagtgg

SEQ ID NO: 1817 - DNA, 19 bp, Homo sapiens
  Cyclin C ribozyme binding site
cgaagaattccatagtgga

SEQ ID NO: 1818 - DNA, 19 bp, Homo sapiens
  Cyclin C ribozyme binding site
gaattccatagtggaccac

SEQ ID NO: 1819 - DNA, 19 bp, Homo sapiens
  Cyclin C ribozyme binding site
tggaccacttggaaataaa

SEQ ID NO: 1820 - DNA, 19 bp, Homo sapiens
  Cyclin D1 ribozyme binding site
acaccagctcctgtgctgc

SEQ ID NO: 1821 - DNA, 19 bp, Homo sapiens
  Cyclin D1 ribozyme binding site
ggaaaccatccgccgcgcg

SEQ ID NO: 1822 - DNA, 19 bp, Homo sapiens
  Cyclin D1 ribozyme binding site
gccgcgcgtaccccgatgc

SEQ ID NO: 1823 - DNA, 19 bp, Homo sapiens
  Cyclin D1 ribozyme binding site
tgccaacctcctcaacgac

SEQ ID NO: 1824 - DNA, 19 bp, Homo sapiens
  Cyclin D1 ribozyme binding site
caacctcctcaacgaccgg

SEQ ID NO: 1825 - DNA, 19 bp, Homo sapiens
  Cyclin D1 ribozyme binding site
gcgcgccctcggtgtccta

SEQ ID NO: 1826 - DNA, 19 bp, Homo sapiens
  Cyclin D1 ribozyme binding site
cctcggtgtcctacttcaa

SEQ ID NO: 1827 - DNA, 19 bp, Homo sapiens
  Cyclin D1 ribozyme binding site
cggtgtcctacttcaaatg

SEQ ID NO: 1828 - DNA, 19 bp, Homo sapiens
  Cyclin D1 ribozyme binding site
tgtcctacttcaaatgtgt

SEQ ID NO: 1829 - DNA, 19 bp, Homo sapiens
  Cyclin D1 ribozyme binding site
gtcctacttcaaatgtgtg

SEQ ID NO: 1830 - DNA, 19 bp, Homo sapiens
  Cyclin D1 ribozyme binding site
gaaggaggtcctgccgtcc

SEQ ID NO: 1831 - DNA, 19 bp, Homo sapiens
  Cyclin D1 ribozyme binding site
tcctgccgtccatgcggaa

SEQ ID NO: 1832 - DNA, 19 bp, Homo sapiens
  Cyclin D1 ribozyme binding site
gcggaagatcgtcgccacc

SEQ ID NO: 1833 - DNA, 19 bp, Homo sapiens
  Cyclin D1 ribozyme binding site
gaagatcgtcgccacctgg

SEQ ID NO: 1834 - DNA, 19 bp, Homo sapiens
  Cyclin D1 ribozyme binding site
gctggaggtctgcgaggaa

SEQ ID NO: 1835 - DNA, 19 bp, Homo sapiens
  Cyclin D1 ribozyme binding site
ggaggaggtcttcccgctg

SEQ ID NO: 1836 - DNA, 19 bp, Homo sapiens
  Cyclin D1 ribozyme binding site
aggaggtcttcccgctggc

SEQ ID NO: 1837 - DNA, 19 bp, Homo sapiens
  Cyclin D1 ribozyme binding site
ggaggtcttcccgctggcc

SEQ ID NO: 1838 - DNA, 19 bp, Homo sapiens
  Cyclin D1 ribozyme binding site
ccatgaactacctggaccg

SEQ ID NO: 1839 - DNA, 19 bp, Homo sapiens
  Cyclin D1 ribozyme binding site
tggaccgcttcctgtcgct

SEQ ID NO: 1840 - DNA, 19 bp, Homo sapiens
  Cyclin D1 ribozyme binding site
ggaccgcttcctgtcgctg

SEQ ID NO: 1841 - DNA, 19 bp, Homo sapiens
  Cyclin D1 ribozyme binding site
gcttcctgtcgctggagcc

SEQ ID NO: 1842 - DNA, 19 bp, Homo sapiens
  Cyclin D1 ribozyme binding site
ggggccacttgcatgttcg

SEQ ID NO: 1843 - DNA, 19 bp, Homo sapiens
  Cyclin D1 ribozyme binding site
cttgcatgttcgtggcctc

SEQ ID NO: 1844 - DNA, 19 bp, Homo sapiens
  Cyclin D1 ribozyme binding site
ttgcatgttcgtggcctct

SEQ ID NO: 1845 - DNA, 19 bp, Homo sapiens
  Cyclin D1 ribozyme binding site
tcgtggcctctaagatgaa

SEQ ID NO: 1846 - DNA, 19 bp, Homo sapiens
  Cyclin D1 ribozyme binding site
gtggcctctaagatgaagg

SEQ ID NO: 1847 - DNA, 19 bp, Homo sapiens
  Cyclin D1 ribozyme binding site
ggagaccatccccctgacg

SEQ ID NO: 1848 - DNA, 19 bp, Homo sapiens
  Cyclin D1 ribozyme binding site
gctgtgcatctacaccgac

SEQ ID NO: 1849 - DNA, 19 bp, Homo sapiens
  Cyclin D1 ribozyme binding site
tgtgcatctacaccgacaa

SEQ ID NO: 1850 - DNA, 19 bp, Homo sapiens
  Cyclin D1 ribozyme binding site
ccgacaactccatccggcc

SEQ ID NO: 1851 - DNA, 19 bp, Homo sapiens
  Cyclin D1 ribozyme binding site
caactccatccggcccgag

SEQ ID NO: 1852 - DNA, 19 bp, Homo sapiens
  Cyclin D1 ribozyme binding site
ggagctgctcctggtgaac

SEQ ID NO: 1853 - DNA, 19 bp, Homo sapiens
  Cyclin D1 ribozyme binding site
gaacaagctcaagtggaac

SEQ ID NO: 1854 - DNA, 19 bp, Homo sapiens
  Cyclin D1 ribozyme binding site
ccgcacgatttcattgaac

SEQ ID NO: 1855 - DNA, 19 bp, Homo sapiens
  Cyclin D1 ribozyme binding site
cgcacgatttcattgaaca

SEQ ID NO: 1856 - DNA, 19 bp, Homo sapiens
  Cyclin D1 ribozyme binding site
gcacgatttcattgaacac

SEQ ID NO: 1857 - DNA, 19 bp, Homo sapiens
  Cyclin D1 ribozyme binding site
cgatttcattgaacacttc

SEQ ID NO: 1858 - DNA, 19 bp, Homo sapiens
  Cyclin D1 ribozyme binding site
ttgaacacttcctctccaa

SEQ ID NO: 1859 - DNA, 19 bp, Homo sapiens
  Cyclin D1 ribozyme binding site
tgaacacttcctctccaaa

SEQ ID NO: 1860 - DNA, 19 bp, Homo sapiens
  Cyclin D1 ribozyme binding site
acacttcctctccaaaatg

SEQ ID NO: 1861 - DNA, 19 bp, Homo sapiens
  Cyclin D1 ribozyme binding site
acttcctctccaaaatgcc

SEQ ID NO: 1862 - DNA, 19 bp, Homo sapiens
  Cyclin D1 ribozyme binding site
caaacagatcatccgcaaa

SEQ ID NO: 1863 - DNA, 19 bp, Homo sapiens
  Cyclin D1 ribozyme binding site
acagatcatccgcaaacac

SEQ ID NO: 1864 - DNA, 19 bp, Homo sapiens
  Cyclin D1 ribozyme binding site
cgcagaccttcgttgccct

SEQ ID NO: 1865 - DNA, 19 bp, Homo sapiens
  Cyclin D1 ribozyme binding site
gcagaccttcgttgccctc

SEQ ID NO: 1866 - DNA, 19 bp, Homo sapiens
  Cyclin D1 ribozyme binding site
gaccttcgttgccctctgt

SEQ ID NO: 1867 - DNA, 19 bp, Homo sapiens
  Cyclin D1 ribozyme binding site
cgttgccctctgtgccaca

SEQ ID NO: 1868 - DNA, 19 bp, Homo sapiens
  Cyclin D1 ribozyme binding site
atgtgaagttcatttccaa

SEQ ID NO: 1869 - DNA, 19 bp, Homo sapiens
  Cyclin D1 ribozyme binding site
tgtgaagttcatttccaat

SEQ ID NO: 1870 - DNA, 19 bp, Homo sapiens
  Cyclin D1 ribozyme binding site
gaagttcatttccaatccg

SEQ ID NO: 1871 - DNA, 19 bp, Homo sapiens
  Cyclin D1 ribozyme binding site
aagttcatttccaatccgc

SEQ ID NO: 1872 - DNA, 19 bp, Homo sapiens
  Cyclin D1 ribozyme binding site
agttcatttccaatccgcc

SEQ ID NO: 1873 - DNA, 19 bp, Homo sapiens
  Cyclin D1 ribozyme binding site
atttccaatccgccctcca

SEQ ID NO: 1874 - DNA, 19 bp, Homo sapiens
  Cyclin D1 ribozyme binding site
atccgccctccatggtggc

SEQ ID NO: 1875 - DNA, 19 bp, Homo sapiens
  Cyclin D1 ribozyme binding site
ccaacaacttcctgtccta

SEQ ID NO: 1876 - DNA, 19 bp, Homo sapiens
  Cyclin D1 ribozyme binding site
caacaacttcctgtcctac

SEQ ID NO: 1877 - DNA, 19 bp, Homo sapiens
  Cyclin D1 ribozyme binding site
acttcctgtcctactaccg

SEQ ID NO: 1878 - DNA, 19 bp, Homo sapiens
  Cyclin D1 ribozyme binding site
tcctgtcctactaccgcct

SEQ ID NO: 1879 - DNA, 19 bp, Homo sapiens
  Cyclin D1 ribozyme binding site
tgtcctactaccgcctcac

SEQ ID NO: 1880 - DNA, 19 bp, Homo sapiens
  Cyclin D1 ribozyme binding site
ctaccgcctcacacgcttc

SEQ ID NO: 1881 - DNA, 19 bp, Homo sapiens
  Cyclin D1 ribozyme binding site
tcacacgcttcctctccag

SEQ ID NO: 1882 - DNA, 19 bp, Homo sapiens
  Cyclin D1 ribozyme binding site
cacacgcttcctctccaga

SEQ ID NO: 1883 - DNA, 19 bp, Homo sapiens
  Cyclin D1 ribozyme binding site
acgcttcctctccagagtg

SEQ ID NO: 1884 - DNA, 19 bp, Homo sapiens
  Cyclin D1 ribozyme binding site
gcttcctctccagagtgat

SEQ ID NO: 1885 - DNA, 19 bp, Homo sapiens
  Cyclin D1 ribozyme binding site
cagagtgatcaagtgtgac

SEQ ID NO: 1886 - DNA, 19 bp, Homo sapiens
  Cyclin D1 ribozyme binding site
ggactgcctccgggcctgc

SEQ ID NO: 1887 - DNA, 19 bp, Homo sapiens
  Cyclin D1 ribozyme binding site
ggagcagatcgaagccctg

SEQ ID NO: 1888 - DNA, 19 bp, Homo sapiens
  Cyclin D1 ribozyme binding site
tgctggagtcaagcctgcg

SEQ ID NO: 1889 - DNA, 19 bp, Homo sapiens
  Cyclin D1 ribozyme binding site
gacctggcttgcacaccca

SEQ ID NO: 1890 - DNA, 19 bp, Homo sapiens
  Cyclin D2 ribozyme binding site
ggacccggtccgcagggcc

SEQ ID NO: 1891 - DNA, 19 bp, Homo sapiens
  Cyclin D2 ribozyme binding site
caacctgctccgagacgac

SEQ ID NO: 1892 - DNA, 19 bp, Homo sapiens
  Cyclin D2 ribozyme binding site
cgaccgcgtcctgcagaac

SEQ ID NO: 1893 - DNA, 19 bp, Homo sapiens
  Cyclin D2 ribozyme binding site
gaacctgctcaccatcgag

SEQ ID NO: 1894 - DNA, 19 bp, Homo sapiens
  Cyclin D2 ribozyme binding site
gctcaccatcgaggagcgc

SEQ ID NO: 1895 - DNA, 19 bp, Homo sapiens
  Cyclin D2 ribozyme binding site
aggagcgctaccttccgca

SEQ ID NO: 1896 - DNA, 19 bp, Homo sapiens
  Cyclin D2 ribozyme binding site
gcgctaccttccgcagtgc

SEQ ID NO: 1897 - DNA, 19 bp, Homo sapiens
  Cyclin D2 ribozyme binding site
cgctaccttccgcagtgct

SEQ ID NO: 1898 - DNA, 19 bp, Homo sapiens
  Cyclin D2 ribozyme binding site
cgcagtgctcctacttcaa

SEQ ID NO: 1899 - DNA, 19 bp, Homo sapiens
  Cyclin D2 ribozyme binding site
agtgctcctacttcaagtg

SEQ ID NO: 1900 - DNA, 19 bp, Homo sapiens
  Cyclin D2 ribozyme binding site
gctcctacttcaagtgcgt

SEQ ID NO: 1901 - DNA, 19 bp, Homo sapiens
  Cyclin D2 ribozyme binding site
ctcctacttcaagtgcgtg

SEQ ID NO: 1902 - DNA, 19 bp, Homo sapiens
  Cyclin D2 ribozyme binding site
gaaggacatccaaccctac

SEQ ID NO: 1903 - DNA, 19 bp, Homo sapiens
  Cyclin D2 ribozyme binding site
tccaaccctacatgcgcag

SEQ ID NO: 1904 - DNA, 19 bp, Homo sapiens
  Cyclin D2 ribozyme binding site
gctggaggtctgtgaggaa

SEQ ID NO: 1905 - DNA, 19 bp, Homo sapiens
  Cyclin D2 ribozyme binding site
agaagaggtcttccctctg

SEQ ID NO: 1906 - DNA, 19 bp, Homo sapiens
  Cyclin D2 ribozyme binding site
aagaggtcttccctctggc

SEQ ID NO: 1907 - DNA, 19 bp, Homo sapiens
  Cyclin D2 ribozyme binding site
agaggtcttccctctggcc

SEQ ID NO: 1908 - DNA, 19 bp, Homo sapiens
  Cyclin D2 ribozyme binding site
gtcttccctctggccatga

SEQ ID NO: 1909 - DNA, 19 bp, Homo sapiens
  Cyclin D2 ribozyme binding site
gccatgaattacctggacc

SEQ ID NO: 1910 - DNA, 19 bp, Homo sapiens
  Cyclin D2 ribozyme binding site
ccatgaattacctggaccg

SEQ ID NO: 1911 - DNA, 19 bp, Homo sapiens
  Cyclin D2 ribozyme binding site
ctggaccgtttcttggctg

SEQ ID NO: 1912 - DNA, 19 bp, Homo sapiens
  Cyclin D2 ribozyme binding site
tggaccgtttcttggctgg

SEQ ID NO: 1913 - DNA, 19 bp, Homo sapiens
  Cyclin D2 ribozyme binding site
ggaccgtttcttggctggg

SEQ ID NO: 1914 - DNA, 19 bp, Homo sapiens
  Cyclin D2 ribozyme binding site
accgtttcttggctggggt

SEQ ID NO: 1915 - DNA, 19 bp, Homo sapiens
  Cyclin D2 ribozyme binding site
ggctggggtcccgactccg

SEQ ID NO: 1916 - DNA, 19 bp, Homo sapiens
  Cyclin D2 ribozyme binding site
gtcccgactccgaagtccc

SEQ ID NO: 1917 - DNA, 19 bp, Homo sapiens
  Cyclin D2 ribozyme binding site
ctccgaagtcccatctgca

SEQ ID NO: 1918 - DNA, 19 bp, Homo sapiens
  Cyclin D2 ribozyme binding site
aagtcccatctgcaactcc

SEQ ID NO: 1919 - DNA, 19 bp, Homo sapiens
  Cyclin D2 ribozyme binding site
tctgcaactcctgggtgct

SEQ ID NO: 1920 - DNA, 19 bp, Homo sapiens
  Cyclin D2 ribozyme binding site
gggtgctgtctgcatgttc

SEQ ID NO: 1921 - DNA, 19 bp, Homo sapiens
  Cyclin D2 ribozyme binding site
tctgcatgttcctggcctc

SEQ ID NO: 1922 - DNA, 19 bp, Homo sapiens
  Cyclin D2 ribozyme binding site
ctgcatgttcctggcctcc

SEQ ID NO: 1923 - DNA, 19 bp, Homo sapiens
  Cyclin D2 ribozyme binding site
tcctggcctccaaactcaa

SEQ ID NO: 1924 - DNA, 19 bp, Homo sapiens
  Cyclin D2 ribozyme binding site
ctccaaactcaaagagacc

SEQ ID NO: 1925 - DNA, 19 bp, Homo sapiens
  Cyclin D2 ribozyme binding site
gctgtgcatttacaccgac

SEQ ID NO: 1926 - DNA, 19 bp, Homo sapiens
  Cyclin D2 ribozyme binding site
ctgtgcatttacaccgaca

SEQ ID NO: 1927 - DNA, 19 bp, Homo sapiens
  Cyclin D2 ribozyme binding site
tgtgcatttacaccgacaa

SEQ ID NO: 1928 - DNA, 19 bp, Homo sapiens
  Cyclin D2 ribozyme binding site
ccgacaactccatcaagcc

SEQ ID NO: 1929 - DNA, 19 bp, Homo sapiens
  Cyclin D2 ribozyme binding site
caactccatcaagcctcag

SEQ ID NO: 1930 - DNA, 19 bp, Homo sapiens
  Cyclin D2 ribozyme binding site
atcaagcctcaggagctgc

SEQ ID NO: 1931 - DNA, 19 bp, Homo sapiens
  Cyclin D2 ribozyme binding site
tggggaagttgaagtggaa

SEQ ID NO: 1932 - DNA, 19 bp, Homo sapiens
  Cyclin D2 ribozyme binding site
ggcagctgtcactcctcat

SEQ ID NO: 1933 - DNA, 19 bp, Homo sapiens
  Cyclin D2 ribozyme binding site
gctgtcactcctcatgact

SEQ ID NO: 1934 - DNA, 19 bp, Homo sapiens
  Cyclin D2 ribozyme binding site
gtcactcctcatgacttca

SEQ ID NO: 1935 - DNA, 19 bp, Homo sapiens
  Cyclin D2 ribozyme binding site
ctcatgacttcattgagca

SEQ ID NO: 1936 - DNA, 19 bp, Homo sapiens
  Cyclin D2 ribozyme binding site
tcatgacttcattgagcac

SEQ ID NO: 1937 - DNA, 19 bp, Homo sapiens
  Cyclin D2 ribozyme binding site
tgacttcattgagcacatc

SEQ ID NO: 1938 - DNA, 19 bp, Homo sapiens
  Cyclin D2 ribozyme binding site
tgagcacatcttgcgcaag

SEQ ID NO: 1939 - DNA, 19 bp, Homo sapiens
  Cyclin D2 ribozyme binding site
agcacatcttgcgcaagct

SEQ ID NO: 1940 - DNA, 19 bp, Homo sapiens
  Cyclin D2 ribozyme binding site
agaagctgtctctgatccg

SEQ ID NO: 1941 - DNA, 19 bp, Homo sapiens
  Cyclin D2 ribozyme binding site
aagctgtctctgatccgca

SEQ ID NO: 1942 - DNA, 19 bp, Homo sapiens
  Cyclin D2 ribozyme binding site
gtctctgatccgcaagcat

SEQ ID NO: 1943 - DNA, 19 bp, Homo sapiens
  Cyclin D2 ribozyme binding site
aagcatgctcagaccttca

SEQ ID NO: 1944 - DNA, 19 bp, Homo sapiens
  Cyclin D2 ribozyme binding site
ctcagaccttcattgctct

SEQ ID NO: 1945 - DNA, 19 bp, Homo sapiens
  Cyclin D2 ribozyme binding site
tcagaccttcattgctctg

SEQ ID NO: 1946 - DNA, 19 bp, Homo sapiens
  Cyclin D2 ribozyme binding site
gaccttcattgctctgtgt

SEQ ID NO: 1947 - DNA, 19 bp, Homo sapiens
  Cyclin D2 ribozyme binding site
ttcattgctctgtgtgcca

SEQ ID NO: 1948 - DNA, 19 bp, Homo sapiens
  Cyclin D2 ribozyme binding site
ccaccgactttaagtttgc

SEQ ID NO: 1949 - DNA, 19 bp, Homo sapiens
  Cyclin D2 ribozyme binding site
caccgactttaagtttgcc

SEQ ID NO: 1950 - DNA, 19 bp, Homo sapiens
  Cyclin D2 ribozyme binding site
accgactttaagtttgcca

SEQ ID NO: 1951 - DNA, 19 bp, Homo sapiens
  Cyclin D2 ribozyme binding site
actttaagtttgccatgta

SEQ ID NO: 1952 - DNA, 19 bp, Homo sapiens
  Cyclin D2 ribozyme binding site
ctttaagtttgccatgtac

SEQ ID NO: 1953 - DNA, 19 bp, Homo sapiens
  Cyclin D2 ribozyme binding site
ttgccatgtacccaccgtc

SEQ ID NO: 1954 - DNA, 19 bp, Homo sapiens
  Cyclin D2 ribozyme binding site
acccaccgtcgatgatcgc

SEQ ID NO: 1955 - DNA, 19 bp, Homo sapiens
  Cyclin D2 ribozyme binding site
gtcgatgatcgcaactgga

SEQ ID NO: 1956 - DNA, 19 bp, Homo sapiens
  Cyclin D2 ribozyme binding site
agcagccatctgtgggctc

SEQ ID NO: 1957 - DNA, 19 bp, Homo sapiens
  Cyclin D2 ribozyme binding site
ctgtgggctccagcaggat

SEQ ID NO: 1958 - DNA, 19 bp, Homo sapiens
  Cyclin D2 ribozyme binding site
aagtgagctcgctcacttg

SEQ ID NO: 1959 - DNA, 19 bp, Homo sapiens
  Cyclin D2 ribozyme binding site
gagctcgctcacttgtgat

SEQ ID NO: 1960 - DNA, 19 bp, Homo sapiens
  Cyclin D2 ribozyme binding site
tcgctcacttgtgatgccc

SEQ ID NO: 1961 - DNA, 19 bp, Homo sapiens
  Cyclin D2 ribozyme binding site
ctgctggctaagatcacca

SEQ ID NO: 1962 - DNA, 19 bp, Homo sapiens
  Cyclin D2 ribozyme binding site
ggctaagatcaccaacaca

SEQ ID NO: 1963 - DNA, 19 bp, Homo sapiens
  Cyclin D2 ribozyme binding site
gacgtggattgtctcaaag

SEQ ID NO: 1964 - DNA, 19 bp, Homo sapiens
  Cyclin D2 ribozyme binding site
gtggattgtctcaaagctt

SEQ ID NO: 1965 - DNA, 19 bp, Homo sapiens
  Cyclin D2 ribozyme binding site
ggattgtctcaaagcttgc

SEQ ID NO: 1966 - DNA, 19 bp, Homo sapiens
  Cyclin D2 ribozyme binding site
ctcaaagcttgccaggagc

SEQ ID NO: 1967 - DNA, 19 bp, Homo sapiens
  Cyclin D2 ribozyme binding site
ggagcagattgaggcggtg

SEQ ID NO: 1968 - DNA, 19 bp, Homo sapiens
  Cyclin D2 ribozyme binding site
ggcggtgctcctcaatagc

SEQ ID NO: 1969 - DNA, 19 bp, Homo sapiens
  Cyclin D2 ribozyme binding site
ctcctcaatagcctgcagc

SEQ ID NO: 1970 - DNA, 19 bp, Homo sapiens
  Cyclin D2 ribozyme binding site
tgcagcagtaccgtcagga

SEQ ID NO: 1971 - DNA, 19 bp, Homo sapiens
  Cyclin D2 ribozyme binding site
cagtaccgtcaggaccaac

SEQ ID NO: 1972 - DNA, 19 bp, Homo sapiens
  Cyclin D2 ribozyme binding site
gtgacggatccaagtcgga

SEQ ID NO: 1973 - DNA, 19 bp, Homo sapiens
  Cyclin D2 ribozyme binding site
gatccaagtcggaggatga

SEQ ID NO: 1974 - DNA, 19 bp, Homo sapiens
  Cyclin D2 ribozyme binding site
agcacccctacagacgtgc

SEQ ID NO: 1975 - DNA, 19 bp, Homo sapiens
  Cyclin D2 ribozyme binding site
gtgcgggatatcgacctgt

SEQ ID NO: 1976 - DNA, 19 bp, Homo sapiens
  Cyclin D3 ribozyme binding site
ctgctgtgttgcgaaggca

SEQ ID NO: 1977 - DNA, 19 bp, Homo sapiens
  Cyclin D3 ribozyme binding site
ccagcgtgtcctgcagagc

SEQ ID NO: 1978 - DNA, 19 bp, Homo sapiens
  Cyclin D3 ribozyme binding site
gagcctgctccgcctggag

SEQ ID NO: 1979 - DNA, 19 bp, Homo sapiens
  Cyclin D3 ribozyme binding site
aggagcgctacgtaccccg

SEQ ID NO: 1980 - DNA, 19 bp, Homo sapiens
  Cyclin D3 ribozyme binding site
gcgctacgtaccccgcgcc

SEQ ID NO: 1981 - DNA, 19 bp, Homo sapiens
  Cyclin D3 ribozyme binding site
cccgcgcctcctacttcca

SEQ ID NO: 1982 - DNA, 19 bp, Homo sapiens
  Cyclin D3 ribozyme binding site
gcgcctcctacttccagtg

SEQ ID NO: 1983 - DNA, 19 bp, Homo sapiens
  Cyclin D3 ribozyme binding site
cctcctacttccagtgcgt

SEQ ID NO: 1984 - DNA, 19 bp, Homo sapiens
  Cyclin D3 ribozyme binding site
ctcctacttccagtgcgtg

SEQ ID NO: 1985 - DNA, 19 bp, Homo sapiens
  Cyclin D3 ribozyme binding site
gcgggagatcaagccgcac

SEQ ID NO: 1986 - DNA, 19 bp, Homo sapiens
  Cyclin D3 ribozyme binding site
atgctggcttactggatgc

SEQ ID NO: 1987 - DNA, 19 bp, Homo sapiens
  Cyclin D3 ribozyme binding site
tgctggcttactggatgct

SEQ ID NO: 1988 - DNA, 19 bp, Homo sapiens
  Cyclin D3 ribozyme binding site
gctggaggtatgtgaggag

SEQ ID NO: 1989 - DNA, 19 bp, Homo sapiens
  Cyclin D3 ribozyme binding site
ggaggaagtcttccccctg

SEQ ID NO: 1990 - DNA, 19 bp, Homo sapiens
  Cyclin D3 ribozyme binding site
aggaagtcttccccctggc

SEQ ID NO: 1991 - DNA, 19 bp, Homo sapiens
  Cyclin D3 ribozyme binding site
ggaagtcttccccctggcc

SEQ ID NO: 1992 - DNA, 19 bp, Homo sapiens
  Cyclin D3 ribozyme binding site
ccatgaactacctggatcg

SEQ ID NO: 1993 - DNA, 19 bp, Homo sapiens
  Cyclin D3 ribozyme binding site
tacctggatcgctacctgt

SEQ ID NO: 1994 - DNA, 19 bp, Homo sapiens
  Cyclin D3 ribozyme binding site
tggatcgctacctgtcttg

SEQ ID NO: 1995 - DNA, 19 bp, Homo sapiens
  Cyclin D3 ribozyme binding site
gctacctgtcttgcgtccc

SEQ ID NO: 1996 - DNA, 19 bp, Homo sapiens
  Cyclin D3 ribozyme binding site
tacctgtcttgcgtcccca

SEQ ID NO: 1997 - DNA, 19 bp, Homo sapiens
  Cyclin D3 ribozyme binding site
gtcttgcgtccccacccga

SEQ ID NO: 1998 - DNA, 19 bp, Homo sapiens
  Cyclin D3 ribozyme binding site
aggcgcagttgcagctcct

SEQ ID NO: 1999 - DNA, 19 bp, Homo sapiens
  Cyclin D3 ribozyme binding site
gttgcagctcctgggtgcg

SEQ ID NO: 2000 - DNA, 19 bp, Homo sapiens
  Cyclin D3 ribozyme binding site
gggtgcggtctgcatgctg

SEQ ID NO: 2001 - DNA, 19 bp, Homo sapiens
  Cyclin D3 ribozyme binding site
tgctggcctccaagctgcg

SEQ ID NO: 2002 - DNA, 19 bp, Homo sapiens
  Cyclin D3 ribozyme binding site
cctgaccatcgaaaaactg

SEQ ID NO: 2003 - DNA, 19 bp, Homo sapiens
  Cyclin D3 ribozyme binding site
actgtgcatctacaccgac

SEQ ID NO: 2004 - DNA, 19 bp, Homo sapiens
  Cyclin D3 ribozyme binding site
tgtgcatctacaccgacca

SEQ ID NO: 2005 - DNA, 19 bp, Homo sapiens
  Cyclin D3 ribozyme binding site
ccacgctgtctctccccgc

SEQ ID NO: 2006 - DNA, 19 bp, Homo sapiens
  Cyclin D3 ribozyme binding site
acgctgtctctccccgcca

SEQ ID NO: 2007 - DNA, 19 bp, Homo sapiens
  Cyclin D3 ribozyme binding site
gctgtctctccccgccagt

SEQ ID NO: 2008 - DNA, 19 bp, Homo sapiens
  Cyclin D3 ribozyme binding site
cccgccagttgcgggactg

SEQ ID NO: 2009 - DNA, 19 bp, Homo sapiens
  Cyclin D3 ribozyme binding site
ggtgctggtcctagggaag

SEQ ID NO: 2010 - DNA, 19 bp, Homo sapiens
  Cyclin D3 ribozyme binding site
gctggtcctagggaagctc

SEQ ID NO: 2011 - DNA, 19 bp, Homo sapiens
  Cyclin D3 ribozyme binding site
agggaagctcaagtgggac

SEQ ID NO: 2012 - DNA, 19 bp, Homo sapiens
  Cyclin D3 ribozyme binding site
tgctgtgattgcacatgat

SEQ ID NO: 2013 - DNA, 19 bp, Homo sapiens
  Cyclin D3 ribozyme binding site
gcacatgatttcctggcct

SEQ ID NO: 2014 - DNA, 19 bp, Homo sapiens
  Cyclin D3 ribozyme binding site
cacatgatttcctggcctt

SEQ ID NO: 2015 - DNA, 19 bp, Homo sapiens
  Cyclin D3 ribozyme binding site
acatgatttcctggccttc

SEQ ID NO: 2016 - DNA, 19 bp, Homo sapiens
  Cyclin D3 ribozyme binding site
tcctggccttcattctgca

SEQ ID NO: 2017 - DNA, 19 bp, Homo sapiens
  Cyclin D3 ribozyme binding site
cctggccttcattctgcac

SEQ ID NO: 2018 - DNA, 19 bp, Homo sapiens
  Cyclin D3 ribozyme binding site
ggccttcattctgcaccgg

SEQ ID NO: 2019 - DNA, 19 bp, Homo sapiens
  Cyclin D3 ribozyme binding site
gccttcattctgcaccggc

SEQ ID NO: 2020 - DNA, 19 bp, Homo sapiens
  Cyclin D3 ribozyme binding site
gcaccggctctctctgccc

SEQ ID NO: 2021 - DNA, 19 bp, Homo sapiens
  Cyclin D3 ribozyme binding site
accggctctctctgccccg

SEQ ID NO: 2022 - DNA, 19 bp, Homo sapiens
  Cyclin D3 ribozyme binding site
cggctctctctgccccgtg

SEQ ID NO: 2023 - DNA, 19 bp, Homo sapiens
  Cyclin D3 ribozyme binding site
gacaggccttggtcaaaaa

SEQ ID NO: 2024 - DNA, 19 bp, Homo sapiens
  Cyclin D3 ribozyme binding site
ggccttggtcaaaaagcat

SEQ ID NO: 2025 - DNA, 19 bp, Homo sapiens
  Cyclin D3 ribozyme binding site
cccagacctttttggccct

SEQ ID NO: 2026 - DNA, 19 bp, Homo sapiens
  Cyclin D3 ribozyme binding site
ccagacctttttggccctc

SEQ ID NO: 2027 - DNA, 19 bp, Homo sapiens
  Cyclin D3 ribozyme binding site
cagacctttttggccctct

SEQ ID NO: 2028 - DNA, 19 bp, Homo sapiens
  Cyclin D3 ribozyme binding site
agacctttttggccctctg

SEQ ID NO: 2029 - DNA, 19 bp, Homo sapiens
  Cyclin D3 ribozyme binding site
tttggccctctgtgctaca

SEQ ID NO: 2030 - DNA, 19 bp, Homo sapiens
  Cyclin D3 ribozyme binding site
ctctgtgctacagattata

SEQ ID NO: 2031 - DNA, 19 bp, Homo sapiens
  Cyclin D3 ribozyme binding site
gctacagattatacctttg

SEQ ID NO: 2032 - DNA, 19 bp, Homo sapiens
  Cyclin D3 ribozyme binding site
ctacagattatacctttgc

SEQ ID NO: 2033 - DNA, 19 bp, Homo sapiens
  Cyclin D3 ribozyme binding site
acagattatacctttgcca

SEQ ID NO: 2034 - DNA, 19 bp, Homo sapiens
  Cyclin D3 ribozyme binding site
attatacctttgccatgta

SEQ ID NO: 2035 - DNA, 19 bp, Homo sapiens
  Cyclin D3 ribozyme binding site
ttatacctttgccatgtac

SEQ ID NO: 2036 - DNA, 19 bp, Homo sapiens
  Cyclin D3 ribozyme binding site
ttgccatgtacccgccatc

SEQ ID NO: 2037 - DNA, 19 bp, Homo sapiens
  Cyclin D3 ribozyme binding site
acccgccatccatgatcgc

SEQ ID NO: 2038 - DNA, 19 bp, Homo sapiens
  Cyclin D3 ribozyme binding site
atccatgatcgccacgggc

SEQ ID NO: 2039 - DNA, 19 bp, Homo sapiens
  Cyclin D3 ribozyme binding site
gggcagcattggggctgca

SEQ ID NO: 2040 - DNA, 19 bp, Homo sapiens
  Cyclin D3 ribozyme binding site
gtgcctgctccatgtccgg

SEQ ID NO: 2041 - DNA, 19 bp, Homo sapiens
  Cyclin D3 ribozyme binding site
gctccatgtccggggatga

SEQ ID NO: 2042 - DNA, 19 bp, Homo sapiens
  Cyclin D3 ribozyme binding site
ggatgagctcacagagctg

SEQ ID NO: 2043 - DNA, 19 bp, Homo sapiens
  Cyclin D3 ribozyme binding site
ggcagggatcactggcact

SEQ ID NO: 2044 - DNA, 19 bp, Homo sapiens
  Cyclin D3 ribozyme binding site
cgggcctgtcaggagcaga

SEQ ID NO: 2045 - DNA, 19 bp, Homo sapiens
  Cyclin D3 ribozyme binding site
ggagcagatcgaagctgca

SEQ ID NO: 2046 - DNA, 19 bp, Homo sapiens
  Cyclin D3 ribozyme binding site
agctgcactcagggagagc

SEQ ID NO: 2047 - DNA, 19 bp, Homo sapiens
  Cyclin D3 ribozyme binding site
ggagagcctcagggaagcc

SEQ ID NO: 2048 - DNA, 19 bp, Homo sapiens
  Cyclin D3 ribozyme binding site
gaagccgctcagaccagct

SEQ ID NO: 2049 - DNA, 19 bp, Homo sapiens
  Cyclin D3 ribozyme binding site
agaccagctccagcccagc

SEQ ID NO: 2050 - DNA, 19 bp, Homo sapiens
  Cyclin D3 ribozyme binding site
cccggggctccagcagcca

SEQ ID NO: 2051 - DNA, 19 bp, Homo sapiens
  Cyclin D3 ribozyme binding site
accagcactcctacagatg

SEQ ID NO: 2052 - DNA, 19 bp, Homo sapiens
  Cyclin D3 ribozyme binding site
agcactcctacagatgtca

SEQ ID NO: 2053 - DNA, 19 bp, Homo sapiens
  Cyclin D3 ribozyme binding site
tacagatgtcacagccata

SEQ ID NO: 2054 - DNA, 19 bp, Homo sapiens
  Cyclin E ribozyme binding site
gcgcggagttctcggctcg

SEQ ID NO: 2055 - DNA, 19 bp, Homo sapiens
  Cyclin E ribozyme binding site
cgcggagttctcggctcgc

SEQ ID NO: 2056 - DNA, 19 bp, Homo sapiens
  Cyclin E ribozyme binding site
cggagttctcggctcgctc

SEQ ID NO: 2057 - DNA, 19 bp, Homo sapiens
  Cyclin E ribozyme binding site
ttctcggctcgctccagga

SEQ ID NO: 2058 - DNA, 19 bp, Homo sapiens
  Cyclin E ribozyme binding site
cggctcgctccaggaagag

SEQ ID NO: 2059 - DNA, 19 bp, Homo sapiens
  Cyclin E ribozyme binding site
cgtgaccgtttttttccag

SEQ ID NO: 2060 - DNA, 19 bp, Homo sapiens
  Cyclin E ribozyme binding site
gtgaccgtttttttgcagg

SEQ ID NO: 2061 - DNA, 19 bp, Homo sapiens
  Cyclin E ribozyme binding site
tgaccgtttttttgcagga

SEQ ID NO: 2062 - DNA, 19 bp, Homo sapiens
  Cyclin E ribozyme binding site
gaccgtttttttgcaggat

SEQ ID NO: 2063 - DNA, 19 bp, Homo sapiens
  Cyclin E ribozyme binding site
accgtttttttgcaggatc

SEQ ID NO: 2064 - DNA, 19 bp, Homo sapiens
  Cyclin E ribozyme binding site
ccgtttttttgcaggatcc

SEQ ID NO: 2065 - DNA, 19 bp, Homo sapiens
  Cyclin E ribozyme binding site
ttgcaggatccagatgaag

SEQ ID NO: 2066 - DNA, 19 bp, Homo sapiens
  Cyclin E ribozyme binding site
ggccaaaatcgacaggacg

SEQ ID NO: 2067 - DNA, 19 bp, Homo sapiens
  Cyclin E ribozyme binding site
agccagccttgggacaata

SEQ ID NO: 2068 - DNA, 19 bp, Homo sapiens
  Cyclin E ribozyme binding site
tgggacaataatgcagtct

SEQ ID NO: 2069 - DNA, 19 bp, Homo sapiens
  Cyclin E ribozyme binding site
taatgcagtctgtgcagac

SEQ ID NO: 2070 - DNA, 19 bp, Homo sapiens
  Cyclin E ribozyme binding site
acccctgctccctgatccc

SEQ ID NO: 2071 - DNA, 19 bp, Homo sapiens
  Cyclin E ribozyme binding site
ctccctgatccccacacct

SEQ ID NO: 2072 - DNA, 19 bp, Homo sapiens
  Cyclin E ribozyme binding site
tgaccgggtttacccaaac

SEQ ID NO: 2073 - DNA, 19 bp, Homo sapiens
  Cyclin E ribozyme binding site
gaccgggtttacccaaact

SEQ ID NO: 2074 - DNA, 19 bp, Homo sapiens
  Cyclin E ribozyme binding site
accgggtttacccaaactc

SEQ ID NO: 2075 - DNA, 19 bp, Homo sapiens
  Cyclin E ribozyme binding site
acccaaactcaacgtgcaa

SEQ ID NO: 2076 - DNA, 19 bp, Homo sapiens
  Cyclin E ribozyme binding site
tgcaagcctcggattattg

SEQ ID NO: 2077 - DNA, 19 bp, Homo sapiens
  Cyclin E ribozyme binding site
gcctcggattattgcacca

SEQ ID NO: 2078 - DNA, 19 bp, Homo sapiens
  Cyclin E ribozyme binding site
cctcggattattgcaccat

SEQ ID NO: 2079 - DNA, 19 bp, Homo sapiens
  Cyclin E ribozyme binding site
tcggattattgcaccatcc

SEQ ID NO: 2080 - DNA, 19 bp, Homo sapiens
  Cyclin E ribozyme binding site
ttgcaccatccagaggctc

SEQ ID NO: 2081 - DNA, 19 bp, Homo sapiens
  Cyclin E ribozyme binding site
ccagaggctccccgctgcc

SEQ ID NO: 2082 - DNA, 19 bp, Homo sapiens
  Cyclin E ribozyme binding site
gctgcctgtactgagctgg

SEQ ID NO: 2083 - DNA, 19 bp, Homo sapiens
  Cyclin E ribozyme binding site
tgggcaaatagagaggaag

SEQ ID NO: 2084 - DNA, 19 bp, Homo sapiens
  Cyclin E ribozyme binding site
agaggaagtctggaaaatc

SEQ ID NO: 2085 - DNA, 19 bp, Homo sapiens
  Cyclin E ribozyme binding site
ctggaaaatcatgttaaac

SEQ ID NO: 2086 - DNA, 19 bp, Homo sapiens
  Cyclin E ribozyme binding site
aaatcatgttaaacaagga

SEQ ID NO: 2087 - DNA, 19 bp, Homo sapiens
  Cyclin E ribozyme binding site
aatcatgttaaacaaggaa

SEQ ID NO: 2088 - DNA, 19 bp, Homo sapiens
  Cyclin E ribozyme binding site
aaaagacatacttaaggga

SEQ ID NO: 2089 - DNA, 19 bp, Homo sapiens
  Cyclin E ribozyme binding site
agacatacttaagggatca

SEQ ID NO: 2090 - DNA, 19 bp, Homo sapiens
  Cyclin E ribozyme binding site
gacatacttaagggatcag

SEQ ID NO: 2091 - DNA, 19 bp, Homo sapiens
  Cyclin E ribozyme binding site
ttaagggatcagcactttc

SEQ ID NO: 2092 - DNA, 19 bp, Homo sapiens
  Cyclin E ribozyme binding site
atcagcactttcttgagca

SEQ ID NO: 2093 - DNA, 19 bp, Homo sapiens
  Cyclin E ribozyme binding site
tcagcactttcttgagcaa

SEQ ID NO: 2094 - DNA, 19 bp, Homo sapiens
  Cyclin E ribozyme binding site
cagcactttcttgagcaac

SEQ ID NO: 2095 - DNA, 19 bp, Homo sapiens
  Cyclin E ribozyme binding site
gcactttcttgagcaacac

SEQ ID NO: 2096 - DNA, 19 bp, Homo sapiens
  Cyclin E ribozyme binding site
caacaccctcttctgcagc

SEQ ID NO: 2097 - DNA, 19 bp, Homo sapiens
  Cyclin E ribozyme binding site
acaccctcttctgcagcca

SEQ ID NO: 2098 - DNA, 19 bp, Homo sapiens
  Cyclin E ribozyme binding site
caccctcttctgcagccaa

SEQ ID NO: 2099 - DNA, 19 bp, Homo sapiens
  Cyclin E ribozyme binding site
gcgagcaattcttctggat

SEQ ID NO: 2100 - DNA, 19 bp, Homo sapiens
  Cyclin E ribozyme binding site
cgagcaattcttctggatt

SEQ ID NO: 2101 - DNA, 19 bp, Homo sapiens
  Cyclin E ribozyme binding site
agcaattcttctggattgg

SEQ ID NO: 2102 - DNA, 19 bp, Homo sapiens
  Cyclin E ribozyme binding site
gcaattcttctggattggt

SEQ ID NO: 2103 - DNA, 19 bp, Homo sapiens
  Cyclin E ribozyme binding site
cttctggattggttaatgg

SEQ ID NO: 2104 - DNA, 19 bp, Homo sapiens
  Cyclin E ribozyme binding site
tggattggttaatggaggt

SEQ ID NO: 2105 - DNA, 19 bp, Homo sapiens
  Cyclin E ribozyme binding site
ggattggttaatggaggtg

SEQ ID NO: 2106 - DNA, 19 bp, Homo sapiens
  Cyclin E ribozyme binding site
gtgtgaagtctataaactt

SEQ ID NO: 2107 - DNA, 19 bp, Homo sapiens
  Cyclin E ribozyme binding site
gtgaagtctataaacttca

SEQ ID NO: 2108 - DNA, 19 bp, Homo sapiens
  Cyclin E ribozyme binding site
gaagtctataaacttcaca

SEQ ID NO: 2109 - DNA, 19 bp, Homo sapiens
  Cyclin E ribozyme binding site
ctataaacttcacagggag

SEQ ID NO: 2110 - DNA, 19 bp, Homo sapiens
  Cyclin E ribozyme binding site
tataaacttcacagggaga

SEQ ID NO: 2111 - DNA, 19 bp, Homo sapiens
  Cyclin E ribozyme binding site
gggagaccttttacttggc

SEQ ID NO: 2112 - DNA, 19 bp, Homo sapiens
  Cyclin E ribozyme binding site
ggagaccttttacttggca

SEQ ID NO: 2113 - DNA, 19 bp, Homo sapiens
  Cyclin E ribozyme binding site
gagaccttttacttggcac

SEQ ID NO: 2114 - DNA, 19 bp, Homo sapiens
  Cyclin E ribozyme binding site
agaccttttacttggcaca

SEQ ID NO: 2115 - DNA, 19 bp, Homo sapiens
  Cyclin E ribozyme binding site
ccttttacttggcacaaga

SEQ ID NO: 2116 - DNA, 19 bp, Homo sapiens
  Cyclin E ribozyme binding site
gcacaagatttctttgacc

SEQ ID NO: 2117 - DNA, 19 bp, Homo sapiens
  Cyclin E ribozyme binding site
cacaagatttctttgaccg

SEQ ID NO: 2118 - DNA, 19 bp, Homo sapiens
  Cyclin E ribozyme binding site
acaagatttctttgaccgg

SEQ ID NO: 2119 - DNA, 19 bp, Homo sapiens
  Cyclin E ribozyme binding site
aagatttctttgaccggta

SEQ ID NO: 2120 - DNA, 19 bp, Homo sapiens
  Cyclin E ribozyme binding site
agatttctttgaccggtat

SEQ ID NO: 2121 - DNA, 19 bp, Homo sapiens
  Cyclin E ribozyme binding site
ttgaccggtatatggcgac

SEQ ID NO: 2122 - DNA, 19 bp, Homo sapiens
  Cyclin E ribozyme binding site
gaccggtatatggcgacac

SEQ ID NO: 2123 - DNA, 19 bp, Homo sapiens
  Cyclin E ribozyme binding site
agaaaatgttgtaaaaact

SEQ ID NO: 2124 - DNA, 19 bp, Homo sapiens
  Cyclin E ribozyme binding site
aaatgttgtaaaaactctt

SEQ ID NO: 2125 - DNA, 19 bp, Homo sapiens
  Cyclin E ribozyme binding site
gtaaaaactcttttacagc

SEQ ID NO: 2126 - DNA, 19 bp, Homo sapiens
  Cyclin E ribozyme binding site
aaaaactcttttacagctt

SEQ ID NO: 2127 - DNA, 19 bp, Homo sapiens
  Cyclin E ribozyme binding site
aaaactcttttacagctta

SEQ ID NO: 2128 - DNA, 19 bp, Homo sapiens
  Cyclin E ribozyme binding site
aaactcttttacagcttat

SEQ ID NO: 2129 - DNA, 19 bp, Homo sapiens
  Cyclin E ribozyme binding site
aactcttttacagcttatt

SEQ ID NO: 2130 - DNA, 19 bp, Homo sapiens
  Cyclin E ribozyme binding site
tttacagcttattgggatt

SEQ ID NO: 2131 - DNA, 19 bp, Homo sapiens
  Cyclin E ribozyme binding site
ttacagcttattgggattt

SEQ ID NO: 2132 - DNA, 19 bp, Homo sapiens
  Cyclin E ribozyme binding site
acagcttattgggatttca

SEQ ID NO: 2133 - DNA, 19 bp, Homo sapiens
  Cyclin E ribozyme binding site
tattgggatttcatcttta

SEQ ID NO: 2134 - DNA, 19 bp, Homo sapiens
  Cyclin E ribozyme binding site
attgggatttcatctttat

SEQ ID NO: 2135 - DNA, 19 bp, Homo sapiens
  Cyclin E ribozyme binding site
ttgggatttcatctttatt

SEQ ID NO: 2136 - DNA, 19 bp, Homo sapiens
  Cyclin E ribozyme binding site
ggatttcatctttatttat

SEQ ID NO: 2137 - DNA, 19 bp, Homo sapiens
  Cyclin E ribozyme binding site
atttcatctttatttattg

SEQ ID NO: 2138 - DNA, 19 bp, Homo sapiens
  Cyclin E ribozyme binding site
tttcatctttatttattgc

SEQ ID NO: 2139 - DNA, 19 bp, Homo sapiens
  Cyclin E ribozyme binding site
ttcatctttatttattgca

SEQ ID NO: 2140 - DNA, 19 bp, Homo sapiens
  Cyclin E ribozyme binding site
catctttatttattgcagc

SEQ ID NO: 2141 - DNA, 19 bp, Homo sapiens
  Cyclin E ribozyme binding site
atctttatttattgcagcc

SEQ ID NO: 2142 - DNA, 19 bp, Homo sapiens
  Cyclin E ribozyme binding site
tctttatttattgcagcca

SEQ ID NO: 2143 - DNA, 19 bp, Homo sapiens
  Cyclin E ribozyme binding site
tttatttattgcagccaaa

SEQ ID NO: 2144 - DNA, 19 bp, Homo sapiens
  Cyclin E ribozyme binding site
agccaaacttgaggaaatc

SEQ ID NO: 2145 - DNA, 19 bp, Homo sapiens
  Cyclin E ribozyme binding site
tgaggaaatctatcctcca

SEQ ID NO: 2146 - DNA, 19 bp, Homo sapiens
  Cyclin E ribozyme binding site
aggaaatctatcctccaaa

SEQ ID NO: 2147 - DNA, 19 bp, Homo sapiens
  Cyclin E ribozyme binding site
gaaatctatcctccaaagt

SEQ ID NO: 2148 - DNA, 19 bp, Homo sapiens
  Cyclin E ribozyme binding site
atctatcctccaaagttgc

SEQ ID NO: 2149 - DNA, 19 bp, Homo sapiens
  Cyclin E ribozyme binding site
ctccaaagttgcaccagtt

SEQ ID NO: 2150 - DNA, 19 bp, Homo sapiens
  Cyclin E ribozyme binding site
tgcaccagtttgcgtatgt

SEQ ID NO: 2151 - DNA, 19 bp, Homo sapiens
  Cyclin E ribozyme binding site
gcaccagtttgcgtatgtg

SEQ ID NO: 2152 - DNA, 19 bp, Homo sapiens
  Cyclin E ribozyme binding site
agtttgcgtatgtgacaga

SEQ ID NO: 2153 - DNA, 19 bp, Homo sapiens
  Cyclin E ribozyme binding site
gatggagcttgttcaggag

SEQ ID NO: 2154 - DNA, 19 bp, Homo sapiens
  Cyclin E ribozyme binding site
ggagcttgttcaggagatg

SEQ ID NO: 2155 - DNA, 19 bp, Homo sapiens
  Cyclin E ribozyme binding site
gagcttgttcaggagatga

SEQ ID NO: 2156 - DNA, 19 bp, Homo sapiens
  Cyclin E ribozyme binding site
agatgaaattctcaccatg

SEQ ID NO: 2157 - DNA, 19 bp, Homo sapiens
  Cyclin E ribozyme binding site
gatgaaattctcaccatgg

SEQ ID NO: 2158 - DNA, 19 bp, Homo sapiens
  Cyclin E ribozyme binding site
tgaaattctcaccatggaa

SEQ ID NO: 2159 - DNA, 19 bp, Homo sapiens
  Cyclin E ribozyme binding site
ccatggaattaatgattat

SEQ ID NO: 2160 - DNA, 19 bp, Homo sapiens
  Cyclin E ribozyme binding site
catggaattaatgattatg

SEQ ID NO: 2161 - DNA, 19 bp, Homo sapiens
  Cyclin E ribozyme binding site
attaatgattatgaaggcc

SEQ ID NO: 2162 - DNA, 19 bp, Homo sapiens
  Cyclin E ribozyme binding site
ttaatgattatgaaggccc

SEQ ID NO: 2163 - DNA, 19 bp, Homo sapiens
  Cyclin E ribozyme binding site
gaaggcccttaagtggcgt

SEQ ID NO: 2164 - DNA, 19 bp, Homo sapiens
  Cyclin E ribozyme binding site
aaggcccttaagtggcgtt

SEQ ID NO: 2165 - DNA, 19 bp, Homo sapiens
  Cyclin E ribozyme binding site
aagtggcgtttaagtcccc

SEQ ID NO: 2166 - DNA, 19 bp, Homo sapiens
  Cyclin E ribozyme binding site
agtggcgtttaagtcccct

SEQ ID NO: 2167 - DNA, 19 bp, Homo sapiens
  Cyclin E ribozyme binding site
gtggcgtttaagtcccctg

SEQ ID NO: 2168 - DNA, 19 bp, Homo sapiens
  Cyclin E ribozyme binding site
cgtttaagtcccctgacta

SEQ ID NO: 2169 - DNA, 19 bp, Homo sapiens
  Cyclin E ribozyme binding site
cccctgactattgtgtcct

SEQ ID NO: 2170 - DNA, 19 bp, Homo sapiens
  Cyclin E ribozyme binding site
cctgactattgtgtcctgg

SEQ ID NO: 2171 - DNA, 19 bp, Homo sapiens
  Cyclin E ribozyme binding site
ctattgtgtcctggctgaa

SEQ ID NO: 2172 - DNA, 19 bp, Homo sapiens
  Cyclin E ribozyme binding site
gctgaatgtatacatgcag

SEQ ID NO: 2173 - DNA, 19 bp, Homo sapiens
  Cyclin E ribozyme binding site
tgaatgtatacatgcaggt

SEQ ID NO: 2174 - DNA, 19 bp, Homo sapiens
  Cyclin E ribozyme binding site
catgcaggttgcatatcta

SEQ ID NO: 2175 - DNA, 19 bp, Homo sapiens
  Cyclin E ribozyme binding site
aggttgcatatctaaatga

SEQ ID NO: 2176 - DNA, 19 bp, Homo sapiens
  Cyclin E ribozyme binding site
gttgcatatctaaatgact

SEQ ID NO: 2177 - DNA, 19 bp, Homo sapiens
  Cyclin E ribozyme binding site
tgcatatctaaatgactta

SEQ ID NO: 2178 - DNA, 19 bp, Homo sapiens
  Cyclin E ribozyme binding site
taaatgacttacatgaagt

SEQ ID NO: 2179 - DNA, 19 bp, Homo sapiens
  Cyclin E ribozyme binding site
aaatgacttacatgaagtg

SEQ ID NO: 2180 - DNA, 19 bp, Homo sapiens
  Cyclin E ribozyme binding site
tgaagtgctactgccgcag

SEQ ID NO: 2181 - DNA, 19 bp, Homo sapiens
  Cyclin E ribozyme binding site
tgccgcagtatccccagca

SEQ ID NO: 2182 - DNA, 19 bp, Homo sapiens
  Cyclin E ribozyme binding site
ccgcagtatccccagcaaa

SEQ ID NO: 2183 - DNA, 19 bp, Homo sapiens
  Cyclin E ribozyme binding site
ccagcaaatctttatacag

SEQ ID NO: 2184 - DNA, 19 bp, Homo sapiens
  Cyclin E ribozyme binding site
agcaaatctttatacagat

SEQ ID NO: 2185 - DNA, 19 bp, Homo sapiens
  Cyclin E ribozyme binding site
gcaaatctttatacagatt

SEQ ID NO: 2186 - DNA, 19 bp, Homo sapiens
  Cyclin E ribozyme binding site
caaatctttatacagattg

SEQ ID NO: 2187 - DNA, 19 bp, Homo sapiens
  Cyclin E ribozyme binding site
aatctttatacagattgca

SEQ ID NO: 2188 - DNA, 19 bp, Homo sapiens
  Cyclin E ribozyme binding site
tatacagattgcagagctg

SEQ ID NO: 2189 - DNA, 19 bp, Homo sapiens
  Cyclin E ribozyme binding site
cagagctgttggatctctg

SEQ ID NO: 2190 - DNA, 19 bp, Homo sapiens
  Cyclin E ribozyme binding site
ctgttggatctctgtgtcc

SEQ ID NO: 2191 - DNA, 19 bp, Homo sapiens
  Cyclin E ribozyme binding site
gttggatctctgtgtcctg

SEQ ID NO: 2192 - DNA, 19 bp, Homo sapiens
  Cyclin E ribozyme binding site
tctctgtgtcctggatgtt

SEQ ID NO: 2193 - DNA, 19 bp, Homo sapiens
  Cyclin E ribozyme binding site
cctggatgttgactgcctt

SEQ ID NO: 2194 - DNA, 19 bp, Homo sapiens
  Cyclin E ribozyme binding site
tgactgccttgaatttcct

SEQ ID NO: 2195 - DNA, 19 bp, Homo sapiens
  Cyclin E ribozyme binding site
gccttgaatttccttatgg

SEQ ID NO: 2196 - DNA, 19 bp, Homo sapiens
  Cyclin E ribozyme binding site
ccttgaatttccttatggt

SEQ ID NO: 2197 - DNA, 19 bp, Homo sapiens
  Cyclin E ribozyme binding site
cttgaatttccttatggta

SEQ ID NO: 2198 - DNA, 19 bp, Homo sapiens
  Cyclin E ribozyme binding site
gaatttccttatggtatac

SEQ ID NO: 2199 - DNA, 19 bp, Homo sapiens
  Cyclin E ribozyme binding site
aatttccttatggtatact

SEQ ID NO: 2200 - DNA, 19 bp, Homo sapiens
  Cyclin E ribozyme binding site
ccttatggtatacttgctg

SEQ ID NO: 2201 - DNA, 19 bp, Homo sapiens
  Cyclin E ribozyme binding site
ttatggtatacttgctgct

SEQ ID NO: 2202 - DNA, 19 bp, Homo sapiens
  Cyclin E ribozyme binding site
tggtatacttgctgcttcg

SEQ ID NO: 2203 - DNA, 19 bp, Homo sapiens
  Cyclin E ribozyme binding site
cttgctgcttcggccttgt

SEQ ID NO: 2204 - DNA, 19 bp, Homo sapiens
  Cyclin E ribozyme binding site
ttgctgcttcggccttgta

SEQ ID NO: 2205 - DNA, 19 bp, Homo sapiens
  Cyclin E ribozyme binding site
cttcggccttgtatcattt

SEQ ID NO: 2206 - DNA, 19 bp, Homo sapiens
  Cyclin E ribozyme binding site
cggccttgtatcatttctc

SEQ ID NO: 2207 - DNA, 19 bp, Homo sapiens
  Cyclin E ribozyme binding site
gccttgtatcatttctcgt

SEQ ID NO: 2208 - DNA, 19 bp, Homo sapiens
  Cyclin E ribozyme binding site
ttgtatcatttctcgtcat

SEQ ID NO: 2209 - DNA, 19 bp, Homo sapiens
  Cyclin E ribozyme binding site
tgtatcatttctcgtcatc

SEQ ID NO: 2210 - DNA, 19 bp, Homo sapiens
  Cyclin E ribozyme binding site
gtatcatttctcgtcatct

SEQ ID NO: 2211 - DNA, 19 bp, Homo sapiens
  Cyclin E ribozyme binding site
atcatttctcgtcatctga

SEQ ID NO: 2212 - DNA, 19 bp, Homo sapiens
  Cyclin E ribozyme binding site
atttctcgtcatctgaatt

SEQ ID NO: 2213 - DNA, 19 bp, Homo sapiens
  Cyclin E ribozyme binding site
tctcgtcatctgaattgat

SEQ ID NO: 2214 - DNA, 19 bp, Homo sapiens
  Cyclin E ribozyme binding site
catctgaattgatgcaaaa

SEQ ID NO: 2215 - DNA, 19 bp, Homo sapiens
  Cyclin E ribozyme binding site
gcaaaaggtttcagggtat

SEQ ID NO: 2216 - DNA, 19 bp, Homo sapiens
  Cyclin E ribozyme binding site
caaaaggtttcagggtatc

SEQ ID NO: 2217 - DNA, 19 bp, Homo sapiens
  Cyclin E ribozyme binding site
aaaaggtttcagggtatca

SEQ ID NO: 2218 - DNA, 19 bp, Homo sapiens
  Cyclin E ribozyme binding site
tttcagggtatcagtggtg

SEQ ID NO: 2219 - DNA, 19 bp, Homo sapiens
  Cyclin E ribozyme binding site
tcagggtatcagtggtgcg

SEQ ID NO: 2220 - DNA, 19 bp, Homo sapiens
  Cyclin E ribozyme binding site
gtgcgacatagagaactgt

SEQ ID NO: 2221 - DNA, 19 bp, Homo sapiens
  Cyclin E ribozyme binding site
gaactgtgtcaagtggatg

SEQ ID NO: 2222 - DNA, 19 bp, Homo sapiens
  Cyclin E ribozyme binding site
gtggatggttccatttgcc

SEQ ID NO: 2223 - DNA, 19 bp, Homo sapiens
  Cyclin E ribozyme binding site
tggatggttccatttgcca

SEQ ID NO: 2224 - DNA, 19 bp, Homo sapiens
  Cyclin E ribozyme binding site
tggttccatttgccatggt

SEQ ID NO: 2225 - DNA, 19 bp, Homo sapiens
  Cyclin E ribozyme binding site
ggttccatttgccatggtt

SEQ ID NO: 2226 - DNA, 19 bp, Homo sapiens
  Cyclin E ribozyme binding site
tgccatggttataagggag

SEQ ID NO: 2227 - DNA, 19 bp, Homo sapiens
  Cyclin E ribozyme binding site
gccatggttataagggaga

SEQ ID NO: 2228 - DNA, 19 bp, Homo sapiens
  Cyclin E ribozyme binding site
catggttataagggagacg

SEQ ID NO: 2229 - DNA, 19 bp, Homo sapiens
  Cyclin E ribozyme binding site
cggggagctcaaaactgaa

SEQ ID NO: 2230 - DNA, 19 bp, Homo sapiens
  Cyclin E ribozyme binding site
tgaagcacttcaggggcgt

SEQ ID NO: 2231 - DNA, 19 bp, Homo sapiens
  Cyclin E ribozyme binding site
gaagcacttcaggggcgtc

SEQ ID NO: 2232 - DNA, 19 bp, Homo sapiens
  Cyclin E ribozyme binding site
caggggcgtcgctgatgaa

SEQ ID NO: 2233 - DNA, 19 bp, Homo sapiens
  Cyclin E ribozyme binding site
acacaacatacagacccac

SEQ ID NO: 2234 - DNA, 19 bp, Homo sapiens
  Cyclin E ribozyme binding site
gagacagcttggatttgct

SEQ ID NO: 2235 - DNA, 19 bp, Homo sapiens
  Cyclin E ribozyme binding site
agcttggatttgctggaca

SEQ ID NO: 2236 - DNA, 19 bp, Homo sapiens
  Cyclin E ribozyme binding site
gcttggatttgctggacaa

SEQ ID NO: 2237 - DNA, 19 bp, Homo sapiens
  Cyclin E ribozyme binding site
aagccatgttgtctgaaca

SEQ ID NO: 2238 - DNA, 19 bp, Homo sapiens
  Cyclin E ribozyme binding site
ccatgttgtctgaacaaaa

SEQ ID NO: 2239 - DNA, 19 bp, Homo sapiens
  Cyclin E ribozyme binding site
gaacaaaatagggcttctc

SEQ ID NO: 2240 - DNA, 19 bp, Homo sapiens
  Cyclin E ribozyme binding site
aatagggcttctcctctcc

SEQ ID NO: 2241 - DNA, 19 bp, Homo sapiens
  Cyclin E ribozyme binding site
atagggcttctcctctccc

SEQ ID NO: 2242 - DNA, 19 bp, Homo sapiens
  Cyclin E ribozyme binding site
agggcttctcctctcccca

SEQ ID NO: 2243 - DNA, 19 bp, Homo sapiens
  Cyclin E ribozyme binding site
gcttctcctctccccagtg

SEQ ID NO: 2244 - DNA, 19 bp, Homo sapiens
  Cyclin E ribozyme binding site
ttctcctctccccagtggg

SEQ ID NO: 2245 - DNA, 19 bp, Homo sapiens
  Cyclin E ribozyme binding site
cagtgggctcctcaccccg

SEQ ID NO: 2246 - DNA, 19 bp, Homo sapiens
  Cyclin E ribozyme binding site
tgggctcctcaccccgcca

SEQ ID NO: 2247 - DNA, 19 bp, Homo sapiens
  Cyclin E ribozyme binding site
cagagcggtaagaagcaga

SEQ ID NO: 2248 - DNA, 19 bp, Homo sapiens
  Cyclin E ribozyme binding site
ccaccccatccttctccac

SEQ ID NO: 2249 - DNA, 19 bp, Homo sapiens
  Cyclin E ribozyme binding site
ccccatccttctccaccaa

SEQ ID NO: 2250 - DNA, 19 bp, Homo sapiens
  Cyclin E ribozyme binding site
cccatccttctccaccaaa

SEQ ID NO: 2251 - DNA, 19 bp, Homo sapiens
  Cyclin E ribozyme binding site
catccttctccaccaaaga

SEQ ID NO: 2252 - DNA, 19 bp, Homo sapiens
  Cyclin E ribozyme binding site
aaagacagttgcgcgcctg

SEQ ID NO: 2253 - DNA, 19 bp, Homo sapiens
  Cyclin E ribozyme binding site
gcgcctgctccacgttctc

SEQ ID NO: 2254 - DNA, 19 bp, Homo sapiens
  Cyclin E ribozyme binding site
gctccacgttctcttctgt

SEQ ID NO: 2255 - DNA, 19 bp, Homo sapiens
  Cyclin E ribozyme binding site
ctccacgttctcttctgtc

SEQ ID NO: 2256 - DNA, 19 bp, Homo sapiens
  Cyclin E ribozyme binding site
ccacgttctcttctgtctg

SEQ ID NO: 2257 - DNA, 19 bp, Homo sapiens
  Cyclin E ribozyme binding site
acgttctcttctgtctgtt

SEQ ID NO: 2258 - DNA, 19 bp, Homo sapiens
  Cyclin E ribozyme binding site
cgttctcttctgtctgttg

SEQ ID NO: 2259 - DNA, 19 bp, Homo sapiens
  Cyclin E ribozyme binding site
ctcttctgtctgttgcagc

SEQ ID NO: 2260 - DNA, 19 bp, Homo sapiens
  Cyclin E ribozyme binding site
tctgtctgttgcagcggag

SEQ ID NO: 2261 - DNA, 19 bp, Homo sapiens
  Cyclin E ribozyme binding site
ggcgtgcgtttgctttaca

SEQ ID NO: 2262 - DNA, 19 bp, Homo sapiens
  Cyclin E ribozyme binding site
gcgtgcgtttgcttttaca

SEQ ID NO: 2263 - DNA, 19 bp, Homo sapiens
  Cyclin E ribozyme binding site
gcgtttgcttttacagata

SEQ ID NO: 2264 - DNA, 19 bp, Homo sapiens
  Cyclin E ribozyme binding site
cgtttgcttttacagatat

SEQ ID NO: 2265 - DNA, 19 bp, Homo sapiens
  Cyclin E ribozyme binding site
gtttgcttttacagatatc

SEQ ID NO: 2266 - DNA, 19 bp, Homo sapiens
  Cyclin E ribozyme binding site
tttgcttttacagatatct

SEQ ID NO: 2267 - DNA, 19 bp, Homo sapiens
  Cyclin E ribozyme binding site
tttacagatatctgaatgg

SEQ ID NO: 2268 - DNA, 19 bp, Homo sapiens
  Cyclin E ribozyme binding site
tacagatatctgaatggaa

SEQ ID NO: 2269 - DNA, 19 bp, Homo sapiens
  Cyclin E ribozyme binding site
gaagagtgtttcttccaca

SEQ ID NO: 2270 - DNA, 19 bp, Homo sapiens
  Cyclin E ribozyme binding site
aagagtgtttcttccacaa

SEQ ID NO: 2271 - DNA, 19 bp, Homo sapiens
  Cyclin E ribozyme binding site
agagtgtttcttccacaac

SEQ ID NO: 2272 - DNA, 19 bp, Homo sapiens
  Cyclin E ribozyme binding site
agtgtttcttccacaacag

SEQ ID NO: 2273 - DNA, 19 bp, Homo sapiens
  Cyclin E ribozyme binding site
gtgtttcttccacaacaga

SEQ ID NO: 2274 - DNA, 19 bp, Homo sapiens
  Cyclin E ribozyme binding site
aacagaagtatttctgtgg

SEQ ID NO: 2275 - DNA, 19 bp, Homo sapiens
  Cyclin E ribozyme binding site
cagaagtatttctgtggat

SEQ ID NO: 2276 - DNA, 19 bp, Homo sapiens
  Cyclin E ribozyme binding site
agaagtatttctgtggatg

SEQ ID NO: 2277 - DNA, 19 bp, Homo sapiens
  Cyclin E ribozyme binding site
gaagtatttctgtggatgg

SEQ ID NO: 2278 - DNA, 19 bp, Homo sapiens
  Cyclin E ribozyme binding site
ggatggcatcaaacagggc

SEQ ID NO: 2279 - DNA, 19 bp, Homo sapiens
  Cyclin E ribozyme binding site
gcaaagtgttttttattga

SEQ ID NO: 2280 - DNA, 19 bp, Homo sapiens
  Cyclin E ribozyme binding site
caaagtgttttttattgaa

SEQ ID NO: 2281 - DNA, 19 bp, Homo sapiens
  Cyclin E ribozyme binding site
aaagtgttttttattgaat

SEQ ID NO: 2282 - DNA, 19 bp, Homo sapiens
  Cyclin E ribozyme binding site
aagtgttttttattgaatg

SEQ ID NO: 2283 - DNA, 19 bp, Homo sapiens
  Cyclin E ribozyme binding site
agtgttttttattgaatgc

SEQ ID NO: 2284 - DNA, 19 bp, Homo sapiens
  Cyclin E ribozyme binding site
gtgttttttattgaatgct

SEQ ID NO: 2285 - DNA, 19 bp, Homo sapiens
  Cyclin E ribozyme binding site
gttttttattgaatgctta

SEQ ID NO: 2286 - DNA, 19 bp, Homo sapiens
  Cyclin E ribozyme binding site
ttgaatgcttataggtttt

SEQ ID NO: 2287 - DNA, 19 bp, Homo sapiens
  Cyclin E ribozyme binding site
tgaatgcttataggttttt

SEQ ID NO: 2288 - DNA, 19 bp, Homo sapiens
  Cyclin E ribozyme binding site
aatgcttataggttttttt

SEQ ID NO: 2289 - DNA, 19 bp, Homo sapiens
  Cyclin E ribozyme binding site
cttataggttttttttaaa

SEQ ID NO: 2290 - DNA, 19 bp, Homo sapiens
  Cyclin E ribozyme binding site
ttataggttttttttaaat

SEQ ID NO: 2291 - DNA, 19 bp, Homo sapiens
  Cyclin E ribozyme binding site
tataggttttttttaaata

SEQ ID NO: 2292 - DNA, 19 bp, Homo sapiens
  Cyclin E ribozyme binding site
ataggttttttttaaataa

SEQ ID NO: 2293 - DNA, 19 bp, Homo sapiens
  Cyclin E ribozyme binding site
taggttttttttaaataag

SEQ ID NO: 2294 - DNA, 19 bp, Homo sapiens
  Cyclin E ribozyme binding site
aggttttttttaaataagt

SEQ ID NO: 2295 - DNA, 19 bp, Homo sapiens
  Cyclin E ribozyme binding site
ggttttttttaaataagtg

SEQ ID NO: 2296 - DNA, 19 bp, Homo sapiens
  Cyclin E ribozyme binding site
gttttttttaaataattgg

SEQ ID NO: 2297 - DNA, 19 bp, Homo sapiens
  Cyclin E ribozyme binding site
tttttaaataagtgggtca

SEQ ID NO: 2298 - DNA, 19 bp, Homo sapiens
  Cyclin E ribozyme binding site
taagtgggtcaagtacacc

SEQ ID NO: 2299 - DNA, 19 bp, Homo sapiens
  Cyclin E ribozyme binding site
gggtcaagtacaccagcca

SEQ ID NO: 2300 - DNA, 19 bp, Homo sapiens
  Cyclin E ribozyme binding site
cagccacctccagacacca

SEQ ID NO: 2301 - DNA, 19 bp, Homo sapiens
  Cyclin E ribozyme binding site
gtgcgtgctcccgatgctg

SEQ ID NO: 2302 - DNA, 19 bp, Homo sapiens
  Cyclin E ribozyme binding site
gatgctgctatggaaggtg

SEQ ID NO: 2303 - DNA, 19 bp, Homo sapiens
  Cyclin E ribozyme binding site
gaaggtgctacttgaccta

SEQ ID NO: 2304 - DNA, 19 bp, Homo sapiens
  Cyclin E ribozyme binding site
ggtgctacttgacctaaag

SEQ ID NO: 2305 - DNA, 19 bp, Homo sapiens
  Cyclin E ribozyme binding site
acttgacctaaaggactcc

SEQ ID NO: 2306 - DNA, 19 bp, Homo sapiens
  Cyclin E ribozyme binding site
taaaggactcccacaacaa

SEQ ID NO: 2307 - DNA, 19 bp, Homo sapiens
  Cyclin E ribozyme binding site
acaaaagcttgaagctgtg

SEQ ID NO: 2308 - DNA, 19 bp, Homo sapiens
  Cyclin E ribozyme binding site
ggcgtggctctcctcgcag

SEQ ID NO: 2309 - DNA, 19 bp, Homo sapiens
  Cyclin E ribozyme binding site
cgtggctctcctcgcaggt

SEQ ID NO: 2310 - DNA, 19 bp, Homo sapiens
  Cyclin E ribozyme binding site
ggctctcctcgcaggtgtt

SEQ ID NO: 2311 - DNA, 19 bp, Homo sapiens
  Cyclin E ribozyme binding site
cgcaggtgttctgggctcc

SEQ ID NO: 2312 - DNA, 19 bp, Homo sapiens
  Cyclin E ribozyme binding site
gcaggtgttctgggctccg

SEQ ID NO: 2313 - DNA, 19 bp, Homo sapiens
  Cyclin E ribozyme binding site
ttctgggctccgttgtacc

SEQ ID NO: 2314 - DNA, 19 bp, Homo sapiens
  Cyclin E ribozyme binding site
gggctccgttgtaccaagt

SEQ ID NO: 2315 - DNA, 19 bp, Homo sapiens
  Cyclin E ribozyme binding site
ctccgttgtaccaagtgga

SEQ ID NO: 2316 - DNA, 19 bp, Homo sapiens
  Cyclin E ribozyme binding site
gcaggtggttgcgggcaag

SEQ ID NO: 2317 - DNA, 19 bp, Homo sapiens
  Cyclin E ribozyme binding site
ggcaagcgttgtgcagagc

SEQ ID NO: 2318 - DNA, 19 bp, Homo sapiens
  Cyclin E ribozyme binding site
agagcccatagccagctgg

SEQ ID NO: 2319 - DNA, 19 bp, Homo sapiens
  Cyclin F ribozyme binding site
cggcgtggtccactgtagg

SEQ ID NO: 2320 - DNA, 19 bp, Homo sapiens
  Cyclin F ribozyme binding site
gtccactgtaggtgtgcca

SEQ ID NO: 2321 - DNA, 19 bp, Homo sapiens
  Cyclin F ribozyme binding site
gccaagtgtttctgttatc

SEQ ID NO: 2322 - DNA, 19 bp, Homo sapiens
  Cyclin F ribozyme binding site
ccaagtgtttctgttatcc

SEQ ID NO: 2323 - DNA, 19 bp, Homo sapiens
  Cyclin F ribozyme binding site
caagtgtttctgttatcct

SEQ ID NO: 2324 - DNA, 19 bp, Homo sapiens
  Cyclin F ribozyme binding site
tgtttctgttatcctacaa

SEQ ID NO: 2325 - DNA, 19 bp, Homo sapiens
  Cyclin F ribozyme binding site
gtttctgttatcctacaaa

SEQ ID NO: 2326 - DNA, 19 bp, Homo sapiens
  Cyclin F ribozyme binding site
ttctgttatcctacaaagc

SEQ ID NO: 2327 - DNA, 19 bp, Homo sapiens
  Cyclin F ribozyme binding site
tgttatcctacaaagcgaa

SEQ ID NO: 2328 - DNA, 19 bp, Homo sapiens
  Cyclin F ribozyme binding site
gcgaagaataaggaggagg

SEQ ID NO: 2329 - DNA, 19 bp, Homo sapiens
  Cyclin F ribozyme binding site
cctgaccatcttgagtctc

SEQ ID NO: 2330 - DNA, 19 bp, Homo sapiens
  Cyclin F ribozyme binding site
tgaccatcttgagtctccc

SEQ ID NO: 2331 - DNA, 19 bp, Homo sapiens
  Cyclin F ribozyme binding site
atcttgagtctccccgaag

SEQ ID NO: 2332 - DNA, 19 bp, Homo sapiens
  Cyclin F ribozyme binding site
cttgagtctccccgaagat

SEQ ID NO: 2333 - DNA, 19 bp, Homo sapiens
  Cyclin F ribozyme binding site
agatgtgctctttcacatc

SEQ ID NO: 2334 - DNA, 19 bp, Homo sapiens
  Cyclin F ribozyme binding site
atgtgctctttcacatcct

SEQ ID NO: 2335 - DNA, 19 bp, Homo sapiens
  Cyclin F ribozyme binding site
tgtgctctttcacatcctg

SEQ ID NO: 2336 - DNA, 19 bp, Homo sapiens
  Cyclin F ribozyme binding site
gtgctctttcacatcctga

SEQ ID NO: 2337 - DNA, 19 bp, Homo sapiens
  Cyclin F ribozyme binding site
ctttcacatcctgaaatgg

SEQ ID NO: 2338 - DNA, 19 bp, Homo sapiens
  Cyclin F ribozyme binding site
gaaatggctttctgtagag

SEQ ID NO: 2339 - DNA, 19 bp, Homo sapiens
  Cyclin F ribozyme binding site
aaatggctttctgtagagg

SEQ ID NO: 2340 - DNA, 19 bp, Homo sapiens
  Cyclin F ribozyme binding site
aatggctttctgtagagga

SEQ ID NO: 2341 - DNA, 19 bp, Homo sapiens
  Cyclin F ribozyme binding site
gctttctgtagaggacatc

SEQ ID NO: 2342 - DNA, 19 bp, Homo sapiens
  Cyclin F ribozyme binding site
agaggacatcctggccgtc

SEQ ID NO: 2343 - DNA, 19 bp, Homo sapiens
  Cyclin F ribozyme binding site
cctggccgtccgagctgta

SEQ ID NO: 2344 - DNA, 19 bp, Homo sapiens
  Cyclin F ribozyme binding site
ccgagctgtacactcccag

SEQ ID NO: 2345 - DNA, 19 bp, Homo sapiens
  Cyclin F ribozyme binding site
ctgtacactcccagctgaa

SEQ ID NO: 2346 - DNA, 19 bp, Homo sapiens
  Cyclin F ribozyme binding site
gtgccagcttccaggagct

SEQ ID NO: 2347 - DNA, 19 bp, Homo sapiens
  Cyclin F ribozyme binding site
tgccagcttccaggagctg

SEQ ID NO: 2348 - DNA, 19 bp, Homo sapiens
  Cyclin F ribozyme binding site
tgtggccgtctccagggaa

SEQ ID NO: 2349 - DNA, 19 bp, Homo sapiens
  Cyclin F ribozyme binding site
tggccgtctccagggaacc

SEQ ID NO: 2350 - DNA, 19 bp, Homo sapiens
  Cyclin F ribozyme binding site
cctgaagctctttgaaagg

SEQ ID NO: 2351 - DNA, 19 bp, Homo sapiens
  Cyclin F ribozyme binding site
tgaagctctttgaaagggc

SEQ ID NO: 2352 - DNA, 19 bp, Homo sapiens
  Cyclin F ribozyme binding site
gaagctctttgaaagggct

SEQ ID NO: 2353 - DNA, 19 bp, Homo sapiens
  Cyclin F ribozyme binding site
aaggggaatttcgaagctg

SEQ ID NO: 2354 - DNA, 19 bp, Homo sapiens
  Cyclin F ribozyme binding site
aggggaatttcgaagctgc

SEQ ID NO: 2355 - DNA, 19 bp, Homo sapiens
  Cyclin F ribozyme binding site
ggggaatttcgaagctgct

SEQ ID NO: 2356 - DNA, 19 bp, Homo sapiens
  Cyclin F ribozyme binding site
gctgggcatagcctacctc

SEQ ID NO: 2357 - DNA, 19 bp, Homo sapiens
  Cyclin F ribozyme binding site
gcatagcctacctctacaa

SEQ ID NO: 2358 - DNA, 19 bp, Homo sapiens
  Cyclin F ribozyme binding site
agcctacctctacaatgaa

SEQ ID NO: 2359 - DNA, 19 bp, Homo sapiens
  Cyclin F ribozyme binding site
cctacctctacaatgaagg

SEQ ID NO: 2360 - DNA, 19 bp, Homo sapiens
  Cyclin F ribozyme binding site
aaggcctgtctgtgtctga

SEQ ID NO: 2361 - DNA, 19 bp, Homo sapiens
  Cyclin F ribozyme binding site
tgtctgtgtctgatgaggc

SEQ ID NO: 2362 - DNA, 19 bp, Homo sapiens
  Cyclin F ribozyme binding site
tgaaggcctctcgcttctt

SEQ ID NO: 2363 - DNA, 19 bp, Homo sapiens
  Cyclin F ribozyme binding site
aaggcctctcgcttcttca

SEQ ID NO: 2364 - DNA, 19 bp, Homo sapiens
  Cyclin F ribozyme binding site
cctctcgcttcttcagtct

SEQ ID NO: 2365 - DNA, 19 bp, Homo sapiens
  Cyclin F ribozyme binding site
ctcgcttcttcagtctcgc

SEQ ID NO: 2366 - DNA, 19 bp, Homo sapiens
  Cyclin F ribozyme binding site
tcgcttcttcagtctcgct

SEQ ID NO: 2367 - DNA, 19 bp, Homo sapiens
  Cyclin F ribozyme binding site
ttcttcagtctcgctgagc

SEQ ID NO: 2368 - DNA, 19 bp, Homo sapiens
  Cyclin F ribozyme binding site
cttcagtctcgctgagcgg

SEQ ID NO: 2369 - DNA, 19 bp, Homo sapiens
  Cyclin F ribozyme binding site
gccgcacctttcatctggc

SEQ ID NO: 2370 - DNA, 19 bp, Homo sapiens
  Cyclin F ribozyme binding site
ccgcacctttcatctggct

SEQ ID NO: 2371 - DNA, 19 bp, Homo sapiens
  Cyclin F ribozyme binding site
cgcacctttcatctggctc

SEQ ID NO: 2372 - DNA, 19 bp, Homo sapiens
  Cyclin F ribozyme binding site
acctttcatctggctcttc

SEQ ID NO: 2373 - DNA, 19 bp, Homo sapiens
  Cyclin F ribozyme binding site
catctggctcttcatccgc

SEQ ID NO: 2374 - DNA, 19 bp, Homo sapiens
  Cyclin F ribozyme binding site
tctggctcttcatccgccc

SEQ ID NO: 2375 - DNA, 19 bp, Homo sapiens
  Cyclin F ribozyme binding site
ctggctcttcatccgccct

SEQ ID NO: 2376 - DNA, 19 bp, Homo sapiens
  Cyclin F ribozyme binding site
gctcttcatccgccctccg

SEQ ID NO: 2377 - DNA, 19 bp, Homo sapiens
  Cyclin F ribozyme binding site
atccgccctccgtggtcgg

SEQ ID NO: 2378 - DNA, 19 bp, Homo sapiens
  Cyclin F ribozyme binding site
ctccgtggtcggtgagcgg

SEQ ID NO: 2379 - DNA, 19 bp, Homo sapiens
  Cyclin F ribozyme binding site
ggccgtggttcacgagagc

SEQ ID NO: 2380 - DNA, 19 bp, Homo sapiens
  Cyclin F ribozyme binding site
gccgtggttcacgagagcc

SEQ ID NO: 2381 - DNA, 19 bp, Homo sapiens
  Cyclin F ribozyme binding site
cgagagcctcagggcagag

SEQ ID NO: 2382 - DNA, 19 bp, Homo sapiens
  Cyclin F ribozyme binding site
cagaggactcacaaagcat

SEQ ID NO: 2383 - DNA, 19 bp, Homo sapiens
  Cyclin F ribozyme binding site
acaaagcatccatattgca

SEQ ID NO: 2384 - DNA, 19 bp, Homo sapiens
  Cyclin F ribozyme binding site
agcatccatattgcactgc

SEQ ID NO: 2385 - DNA, 19 bp, Homo sapiens
  Cyclin F ribozyme binding site
catccatattgcactgctt

SEQ ID NO: 2386 - DNA, 19 bp, Homo sapiens
  Cyclin F ribozyme binding site
tgcactgcttgggcagagt

SEQ ID NO: 2387 - DNA, 19 bp, Homo sapiens
  Cyclin F ribozyme binding site
gtgctgagtctgttcgagg

SEQ ID NO: 2388 - DNA, 19 bp, Homo sapiens
  Cyclin F ribozyme binding site
tgagtctgttcgaggatga

SEQ ID NO: 2389 - DNA, 19 bp, Homo sapiens
  Cyclin F ribozyme binding site
gagtctgttcgaggatgag

SEQ ID NO: 2390 - DNA, 19 bp, Homo sapiens
  Cyclin F ribozyme binding site
atgacctgtttgaggaggc

SEQ ID NO: 2391 - DNA, 19 bp, Homo sapiens
  Cyclin F ribozyme binding site
tgacctgtttgaggaggct

SEQ ID NO: 2392 - DNA, 19 bp, Homo sapiens
  Cyclin F ribozyme binding site
gaggctgctcatcagggat

SEQ ID NO: 2393 - DNA, 19 bp, Homo sapiens
  Cyclin F ribozyme binding site
gctgctcatcagggatgtc

SEQ ID NO: 2394 - DNA, 19 bp, Homo sapiens
  Cyclin F ribozyme binding site
cagggatgtctgaccagct

SEQ ID NO: 2395 - DNA, 19 bp, Homo sapiens
  Cyclin F ribozyme binding site
tgaccagctcctacctcct

SEQ ID NO: 2396 - DNA, 19 bp, Homo sapiens
  Cyclin F ribozyme binding site
ccagctcctacctcctctg

SEQ ID NO: 2397 - DNA, 19 bp, Homo sapiens
  Cyclin F ribozyme binding site
ctcctacctcctctgggaa

SEQ ID NO: 2398 - DNA, 19 bp, Homo sapiens
  Cyclin F ribozyme binding site
ctacctcctctgggaaagc

SEQ ID NO: 2399 - DNA, 19 bp, Homo sapiens
  Cyclin F ribozyme binding site
cagatgtgtcagatcctgg

SEQ ID NO: 2400 - DNA, 19 bp, Homo sapiens
  Cyclin F ribozyme binding site
gtgtcagatcctgggcgat

SEQ ID NO: 2401 - DNA, 19 bp, Homo sapiens
  Cyclin F ribozyme binding site
gcgatgcctccacagcttc

SEQ ID NO: 2402 - DNA, 19 bp, Homo sapiens
  Cyclin F ribozyme binding site
tccacagcttccgaaaact

SEQ ID NO: 2403 - DNA, 19 bp, Homo sapiens
  Cyclin F ribozyme binding site
ccacagcttccgaaaactc

SEQ ID NO: 2404 - DNA, 19 bp, Homo sapiens
  Cyclin F ribozyme binding site
ccgaaaactcagggactac

SEQ ID NO: 2405 - DNA, 19 bp, Homo sapiens
  Cyclin F ribozyme binding site
tcagggactacgctcgcaa

SEQ ID NO: 2406 - DNA, 19 bp, Homo sapiens
  Cyclin F ribozyme binding site
gactacgctcgcaaaggct

SEQ ID NO: 2407 - DNA, 19 bp, Homo sapiens
  Cyclin F ribozyme binding site
cgcagctgtctttagccaa

SEQ ID NO: 2408 - DNA, 19 bp, Homo sapiens
  Cyclin F ribozyme binding site
cagctgtctttagccaaag

SEQ ID NO: 2409 - DNA, 19 bp, Homo sapiens
  Cyclin F ribozyme binding site
agctgtctttagccaaagc

SEQ ID NO: 2410 - DNA, 19 bp, Homo sapiens
  Cyclin F ribozyme binding site
gctgtctttagccaaagcc

SEQ ID NO: 2411 - DNA, 19 bp, Homo sapiens
  Cyclin F ribozyme binding site
aaaccagcttggactggag

SEQ ID NO: 2412 - DNA, 19 bp, Homo sapiens
  Cyclin F ribozyme binding site
gtgagagcttccagtgaga

SEQ ID NO: 2413 - DNA, 19 bp, Homo sapiens
  Cyclin F ribozyme binding site
tgagagcttccagtgagat

SEQ ID NO: 2414 - DNA, 19 bp, Homo sapiens
  Cyclin F ribozyme binding site
cagtgagatcgtctgccag

SEQ ID NO: 2415 - DNA, 19 bp, Homo sapiens
  Cyclin F ribozyme binding site
tgagatcgtctgccagcta

SEQ ID NO: 2416 - DNA, 19 bp, Homo sapiens
  Cyclin F ribozyme binding site
ctgccagctatttcaggct

SEQ ID NO: 2417 - DNA, 19 bp, Homo sapiens
  Cyclin F ribozyme binding site
gccagctatttcaggcttc

SEQ ID NO: 2418 - DNA, 19 bp, Homo sapiens
  Cyclin F ribozyme binding site
ccagctatttcaggcttcc

SEQ ID NO: 2419 - DNA, 19 bp, Homo sapiens
  Cyclin F ribozyme binding site
cagctatttcaggcttccc

SEQ ID NO: 2420 - DNA, 19 bp, Homo sapiens
  Cyclin F ribozyme binding site
tttcaggcttcccaggctg

SEQ ID NO: 2421 - DNA, 19 bp, Homo sapiens
  Cyclin F ribozyme binding site
ttcaggcttcccaggctgt

SEQ ID NO: 2422 - DNA, 19 bp, Homo sapiens
  Cyclin F ribozyme binding site
ccaggctgtcagtaaacaa

SEQ ID NO: 2423 - DNA, 19 bp, Homo sapiens
  Cyclin F ribozyme binding site
gctgtcagtaaacaacaag

SEQ ID NO: 2424 - DNA, 19 bp, Homo sapiens
  Cyclin F ribozyme binding site
acaacaagtcttctccgtg

SEQ ID NO: 2425 - DNA, 19 bp, Homo sapiens
  Cyclin F ribozyme binding site
aacaagtcttctccgtgca

SEQ ID NO: 2426 - DNA, 19 bp, Homo sapiens
  Cyclin F ribozyme binding site
acaagtcttctccgtgcag

SEQ ID NO: 2427 - DNA, 19 bp, Homo sapiens
  Cyclin F ribozyme binding site
aagtcttctccgtgcagaa

SEQ ID NO: 2428 - DNA, 19 bp, Homo sapiens
  Cyclin F ribozyme binding site
gaagggactcaatgacaca

SEQ ID NO: 2429 - DNA, 19 bp, Homo sapiens
  Cyclin F ribozyme binding site
caatgaggtacattctgat

SEQ ID NO: 2430 - DNA, 19 bp, Homo sapiens
  Cyclin F ribozyme binding site
gaggtacattctgatcgac

SEQ ID NO: 2431 - DNA, 19 bp, Homo sapiens
  Cyclin F ribozyme binding site
aggtacattctgatcgact

SEQ ID NO: 2432 - DNA, 19 bp, Homo sapiens
  Cyclin F ribozyme binding site
cattctgatcgactggctg

SEQ ID NO: 2433 - DNA, 19 bp, Homo sapiens
  Cyclin F ribozyme binding site
ggtggaagttgccaccatg

SEQ ID NO: 2434 - DNA, 19 bp, Homo sapiens
  Cyclin F ribozyme binding site
tgaatgacttcacaagcct

SEQ ID NO: 2435 - DNA, 19 bp, Homo sapiens
  Cyclin F ribozyme binding site
gaatgacttcacaagcctg

SEQ ID NO: 2436 - DNA, 19 bp, Homo sapiens
  Cyclin F ribozyme binding site
tggaccggtacctgcggag

SEQ ID NO: 2437 - DNA, 19 bp, Homo sapiens
  Cyclin F ribozyme binding site
tgccgcggtacaggctcca

SEQ ID NO: 2438 - DNA, 19 bp, Homo sapiens
  Cyclin F ribozyme binding site
gtacaggctccagctgctg

SEQ ID NO: 2439 - DNA, 19 bp, Homo sapiens
  Cyclin F ribozyme binding site
gctgggcatcgcctgcatg

SEQ ID NO: 2440 - DNA, 19 bp, Homo sapiens
  Cyclin F ribozyme binding site
ctgcatggtcatctgcacc

SEQ ID NO: 2441 - DNA, 19 bp, Homo sapiens
  Cyclin F ribozyme binding site
catggtcatctgcacccgg

SEQ ID NO: 2442 - DNA, 19 bp, Homo sapiens
  Cyclin F ribozyme binding site
gcacccggtttatcagtaa

SEQ ID NO: 2443 - DNA, 19 bp, Homo sapiens
  Cyclin F ribozyme binding site
cacccggtttatcagtaaa

SEQ ID NO: 2444 - DNA, 19 bp, Homo sapiens
  Cyclin F ribozyme binding site
acccggtttatcagtaaag

SEQ ID NO: 2445 - DNA, 19 bp, Homo sapiens
  Cyclin F ribozyme binding site
ccggtttatcagtaaagag

SEQ ID NO: 2446 - DNA, 19 bp, Homo sapiens
  Cyclin F ribozyme binding site
tttatcagtaaagagatcc

SEQ ID NO: 2447 - DNA, 19 bp, Homo sapiens
  Cyclin F ribozyme binding site
taaagagatcctgaccatc

SEQ ID NO: 2448 - DNA, 19 bp, Homo sapiens
  Cyclin F ribozyme binding site
cctgaccatccgggaggcc

SEQ ID NO: 2449 - DNA, 19 bp, Homo sapiens
  Cyclin F ribozyme binding site
ggaggccgtatggctcacg

SEQ ID NO: 2450 - DNA, 19 bp, Homo sapiens
  Cyclin F ribozyme binding site
cgtatggctcacggacaac

SEQ ID NO: 2451 - DNA, 19 bp, Homo sapiens
  Cyclin F ribozyme binding site
gacaacacttacaagtacg

SEQ ID NO: 2452 - DNA, 19 bp, Homo sapiens
  Cyclin F ribozyme binding site
acaacacttacaagtacga

SEQ ID NO: 2453 - DNA, 19 bp, Homo sapiens
  Cyclin F ribozyme binding site
cttacaagtacgaggacct

SEQ ID NO: 2454 - DNA, 19 bp, Homo sapiens
  Cyclin F ribozyme binding site
gggcgagatcgtctccgcc

SEQ ID NO: 2455 - DNA, 19 bp, Homo sapiens
  Cyclin F ribozyme binding site
cgagatcgtctccgccttg

SEQ ID NO: 2456 - DNA, 19 bp, Homo sapiens
  Cyclin F ribozyme binding site
agatcgtctccgccttgga

SEQ ID NO: 2457 - DNA, 19 bp, Homo sapiens
  Cyclin F ribozyme binding site
tctccgccttggaagggaa

SEQ ID NO: 2458 - DNA, 19 bp, Homo sapiens
  Cyclin F ribozyme binding site
agggaagattcgagtcccc

SEQ ID NO: 2459 - DNA, 19 bp, Homo sapiens
  Cyclin F ribozyme binding site
gggaagattcgagtcccca

SEQ ID NO: 2460 - DNA, 19 bp, Homo sapiens
  Cyclin F ribozyme binding site
gattcgagtccccactgtg

SEQ ID NO: 2461 - DNA, 19 bp, Homo sapiens
  Cyclin F ribozyme binding site
gtggtggattacaaggagg

SEQ ID NO: 2462 - DNA, 19 bp, Homo sapiens
  Cyclin F ribozyme binding site
tggtggattacaaggaggt

SEQ ID NO: 2463 - DNA, 19 bp, Homo sapiens
  Cyclin F ribozyme binding site
caaggaggtcctgctgacg

SEQ ID NO: 2464 - DNA, 19 bp, Homo sapiens
  Cyclin F ribozyme binding site
gctgacgctagtccctgtg

SEQ ID NO: 2465 - DNA, 19 bp, Homo sapiens
  Cyclin F ribozyme binding site
gacgctagtccctgtggag

SEQ ID NO: 2466 - DNA, 19 bp, Homo sapiens
  Cyclin F ribozyme binding site
tgtgcagcttcctctgcga

SEQ ID NO: 2467 - DNA, 19 bp, Homo sapiens
  Cyclin F ribozyme binding site
gtgcagcttcctctgcgag

SEQ ID NO: 2468 - DNA, 19 bp, Homo sapiens
  Cyclin F ribozyme binding site
cagcttcctctgcgagctc

SEQ ID NO: 2469 - DNA, 19 bp, Homo sapiens
  Cyclin F ribozyme binding site
ctgcgagctctccctgctg

SEQ ID NO: 2470 - DNA, 19 bp, Homo sapiens
  Cyclin F ribozyme binding site
gcgagctctccctgctgca

SEQ ID NO: 2471 - DNA, 19 bp, Homo sapiens
  Cyclin F ribozyme binding site
ccagcctgtccgcctacgc

SEQ ID NO: 2472 - DNA, 19 bp, Homo sapiens
  Cyclin F ribozyme binding site
tgtccgcctacgccccagc

SEQ ID NO: 2473 - DNA, 19 bp, Homo sapiens
  Cyclin F ribozyme binding site
agccctgctcctggccaga

SEQ ID NO: 2474 - DNA, 19 bp, Homo sapiens
  Cyclin F ribozyme binding site
tggaccactcagctgtggg

SEQ ID NO: 2475 - DNA, 19 bp, Homo sapiens
  Cyclin F ribozyme binding site
gtgggacctcaccggattc

SEQ ID NO: 2476 - DNA, 19 bp, Homo sapiens
  Cyclin F ribozyme binding site
tcaccggattctcctatga

SEQ ID NO: 2477 - DNA, 19 bp, Homo sapiens
  Cyclin F ribozyme binding site
caccggattctcctatgaa

SEQ ID NO: 2478 - DNA, 19 bp, Homo sapiens
  Cyclin F ribozyme binding site
ccggattctcctatgaaga

SEQ ID NO: 2479 - DNA, 19 bp, Homo sapiens
  Cyclin F ribozyme binding site
gattctcctatgaagacct

SEQ ID NO: 2480 - DNA, 19 bp, Homo sapiens
  Cyclin F ribozyme binding site
tgaagacctcattccctgc

SEQ ID NO: 2481 - DNA, 19 bp, Homo sapiens
  Cyclin F ribozyme binding site
agacctcattccctgcgtc

SEQ ID NO: 2482 - DNA, 19 bp, Homo sapiens
  Cyclin F ribozyme binding site
gacctcattccctgcgtct

SEQ ID NO: 2483 - DNA, 19 bp, Homo sapiens
  Cyclin F ribozyme binding site
tccctgcgtcttgagcctc

SEQ ID NO: 2484 - DNA, 19 bp, Homo sapiens
  Cyclin F ribozyme binding site
cctgcgtcttgagcctcca

SEQ ID NO: 2485 - DNA, 19 bp, Homo sapiens
  Cyclin F ribozyme binding site
cttgagcctccataagaag

SEQ ID NO: 2486 - DNA, 19 bp, Homo sapiens
  Cyclin F ribozyme binding site
agcctccataagaagtgct

SEQ ID NO: 2487 - DNA, 19 bp, Homo sapiens
  Cyclin F ribozyme binding site
agaagtgcttccatgatga

SEQ ID NO: 2488 - DNA, 19 bp, Homo sapiens
  Cyclin F ribozyme binding site
gaagtgcttccatgatgac

SEQ ID NO: 2489 - DNA, 19 bp, Homo sapiens
  Cyclin F ribozyme binding site
ccaaggactacaggcaagt

SEQ ID NO: 2490 - DNA, 19 bp, Homo sapiens
  Cyclin F ribozyme binding site
caggcaagtctctctgacc

SEQ ID NO: 2491 - DNA, 19 bp, Homo sapiens
  Cyclin F ribozyme binding site
ggcaagtctctctgaccgc

SEQ ID NO: 2492 - DNA, 19 bp, Homo sapiens
  Cyclin F ribozyme binding site
caagtctctctgaccgccg

SEQ ID NO: 2493 - DNA, 19 bp, Homo sapiens
  Cyclin F ribozyme binding site
agcagcggtttgaggacaa

SEQ ID NO: 2494 - DNA, 19 bp, Homo sapiens
  Cyclin F ribozyme binding site
gcagcggtttgaggacaag

SEQ ID NO: 2495 - DNA, 19 bp, Homo sapiens
  Cyclin F ribozyme binding site
acaagcgctatggagaaat

SEQ ID NO: 2496 - DNA, 19 bp, Homo sapiens
  Cyclin F ribozyme binding site
tggagaaatcagccaggaa

SEQ ID NO: 2497 - DNA, 19 bp, Homo sapiens
  Cyclin F ribozyme binding site
tgctgagctacagccagtt

SEQ ID NO: 2498 - DNA, 19 bp, Homo sapiens
  Cyclin F ribozyme binding site
acagccagttgtgtgctgc

SEQ ID NO: 2499 - DNA, 19 bp, Homo sapiens
  Cyclin F ribozyme binding site
gtgctgcattaggagtgac

SEQ ID NO: 2500 - DNA, 19 bp, Homo sapiens
  Cyclin F ribozyme binding site
tgctgcattaggagtgaca

SEQ ID NO: 2501 - DNA, 19 bp, Homo sapiens
  Cyclin F ribozyme binding site
cccccgactttcctcagca

SEQ ID NO: 2502 - DNA, 19 bp, Homo sapiens
  Cyclin F ribozyme binding site
ccccgactttcctcagcac

SEQ ID NO: 2503 - DNA, 19 bp, Homo sapiens
  Cyclin F ribozyme binding site
cccgactttcctcagcaca

SEQ ID NO: 2504 - DNA, 19 bp, Homo sapiens
  Cyclin F ribozyme binding site
gactttcctcagcacaggg

SEQ ID NO: 2505 - DNA, 19 bp, Homo sapiens
  Cyclin F ribozyme binding site
aggggagatccacgccttc

SEQ ID NO: 2506 - DNA, 19 bp, Homo sapiens
  Cyclin F ribozyme binding site
tccacgccttcctcagctc

SEQ ID NO: 2507 - DNA, 19 bp, Homo sapiens
  Cyclin F ribozyme binding site
ccacgccttcctcagctct

SEQ ID NO: 2508 - DNA, 19 bp, Homo sapiens
  Cyclin F ribozyme binding site
cgccttcctcagctctccc

SEQ ID NO: 2509 - DNA, 19 bp, Homo sapiens
  Cyclin F ribozyme binding site
tcctcagctctccctcggg

SEQ ID NO: 2510 - DNA, 19 bp, Homo sapiens
  Cyclin F ribozyme binding site
ctcagctctccctcggggc

SEQ ID NO: 2511 - DNA, 19 bp, Homo sapiens
  Cyclin F ribozyme binding site
gctctccctcggggcggag

SEQ ID NO: 2512 - DNA, 19 bp, Homo sapiens
  Cyclin F ribozyme binding site
gaacagcctccaggaagac

SEQ ID NO: 2513 - DNA, 19 bp, Homo sapiens
  Cyclin F ribozyme binding site
gaggcagcttcgttaccac

SEQ ID NO: 2514 - DNA, 19 bp, Homo sapiens
  Cyclin F ribozyme binding site
aggcagcttcgttaccacc

SEQ ID NO: 2515 - DNA, 19 bp, Homo sapiens
  Cyclin F ribozyme binding site
cagcttcgttaccaccccc

SEQ ID NO: 2516 - DNA, 19 bp, Homo sapiens
  Cyclin F ribozyme binding site
agcttcgttaccaccccca

SEQ ID NO: 2517 - DNA, 19 bp, Homo sapiens
  Cyclin F ribozyme binding site
cggagctgtccagccagga

SEQ ID NO: 2518 - DNA, 19 bp, Homo sapiens
  Cyclin F ribozyme binding site
tgggcagcttcctcgactg

SEQ ID NO: 2519 - DNA, 19 bp, Homo sapiens
  Cyclin F ribozyme binding site
gggcagcttcctcgactgg

SEQ ID NO: 2520 - DNA, 19 bp, Homo sapiens
  Cyclin F ribozyme binding site
cagcttcctcgactggagc

SEQ ID NO: 2521 - DNA, 19 bp, Homo sapiens
  Cyclin F ribozyme binding site
actgctgctctggctatga

SEQ ID NO: 2522 - DNA, 19 bp, Homo sapiens
  Cyclin F ribozyme binding site
gctctggctatgaaggcga

SEQ ID NO: 2523 - DNA, 19 bp, Homo sapiens
  Cyclin F ribozyme binding site
gtgacagctcccagcggca

SEQ ID NO: 2524 - DNA, 19 bp, Homo sapiens
  Cyclin F ribozyme binding site
cagcggcatcctcgatgtc

SEQ ID NO: 2525 - DNA, 19 bp, Homo sapiens
  Cyclin F ribozyme binding site
cggcatcctcgatgtcacc

SEQ ID NO: 2526 - DNA, 19 bp, Homo sapiens
  Cyclin F ribozyme binding site
cctcgatgtcaccgtggtc

SEQ ID NO: 2527 - DNA, 19 bp, Homo sapiens
  Cyclin F ribozyme binding site
caccgtggtctacctgaac

SEQ ID NO: 2528 - DNA, 19 bp, Homo sapiens
  Cyclin F ribozyme binding site
ccgtggtctacctgaaccc

SEQ ID NO: 2529 - DNA, 19 bp, Homo sapiens
  Cyclin F ribozyme binding site
gaacagcattgctgccagg

SEQ ID NO: 2530 - DNA, 19 bp, Homo sapiens
  Cyclin F ribozyme binding site
gccaggaatccagtgatga

SEQ ID NO: 2531 - DNA, 19 bp, Homo sapiens
  Cyclin F ribozyme binding site
gaggaggcttgtccagagg

SEQ ID NO: 2532 - DNA, 19 bp, Homo sapiens
  Cyclin F ribozyme binding site
gaggcttgtccagaggcaa

SEQ ID NO: 2533 - DNA, 19 bp, Homo sapiens
  Cyclin F ribozyme binding site
cacccagatccctgcaacc

SEQ ID NO: 2534 - DNA, 19 bp, Homo sapiens
  Cyclin F ribozyme binding site
acccctggtccgcaccagc

SEQ ID NO: 2535 - DNA, 19 bp, Homo sapiens
  Cyclin F ribozyme binding site
gaaggacgtcacgacctca

SEQ ID NO: 2536 - DNA, 19 bp, Homo sapiens
  Cyclin F ribozyme binding site
tcacgacctcagggtactc

SEQ ID NO: 2537 - DNA, 19 bp, Homo sapiens
  Cyclin F ribozyme binding site
cctcagggtactcctccgt

SEQ ID NO: 2538 - DNA, 19 bp, Homo sapiens
  Cyclin F ribozyme binding site
cagggtactcctccgtcag

SEQ ID NO: 2539 - DNA, 19 bp, Homo sapiens
  Cyclin F ribozyme binding site
ggtactcctccgtcagcac

SEQ ID NO: 2540 - DNA, 19 bp, Homo sapiens
  Cyclin F ribozyme binding site
ctcctccgtcagcaccgca

SEQ ID NO: 2541 - DNA, 19 bp, Homo sapiens
  Cyclin F ribozyme binding site
accgcaagtcccacaagct

SEQ ID NO: 2542 - DNA, 19 bp, Homo sapiens
  Cyclin F ribozyme binding site
ccacaagctccgtggacgg

SEQ ID NO: 2543 - DNA, 19 bp, Homo sapiens
  Cyclin F ribozyme binding site
acggtggcttgggggccct

SEQ ID NO: 2544 - DNA, 19 bp, Homo sapiens
  Cyclin F ribozyme binding site
ccccaacctacctcagtgc

SEQ ID NO: 2545 - DNA, 19 bp, Homo sapiens
  Cyclin F ribozyme binding site
aacctacctcagtgctgtc

SEQ ID NO: 2546 - DNA, 19 bp, Homo sapiens
  Cyclin F ribozyme binding site
cagtgctgtccctgcacag

SEQ ID NO: 2547 - DNA, 19 bp, Homo sapiens
  Cyclin F ribozyme binding site
acagtgactcgcacacaca

SEQ ID NO: 2548 - DNA, 19 bp, Homo sapiens
  Cyclin F ribozyme binding site
tgccaccatcaggccagga

SEQ ID NO: 2549 - DNA, 19 bp, Homo sapiens
  Cyclin F ribozyme binding site
ccaggaagtcatgtttaca

SEQ ID NO: 2550 - DNA, 19 bp, Homo sapiens
  Cyclin F ribozyme binding site
aagtcatgtttacagtgtc

SEQ ID NO: 2551 - DNA, 19 bp, Homo sapiens
  Cyclin F ribozyme binding site
agtcatgtttacagtgtcg

SEQ ID NO: 2552 - DNA, 19 bp, Homo sapiens
  Cyclin F ribozyme binding site
gtcatgtttacagtgtcgt

SEQ ID NO: 2553 - DNA, 19 bp, Homo sapiens
  Cyclin F ribozyme binding site
ttacagtgtcgtcccccaa

SEQ ID NO: 2554 - DNA, 19 bp, Homo sapiens
  Cyclin F ribozyme binding site
cagtgtcgtcccccaagtc

SEQ ID NO: 2555 - DNA, 19 bp, Homo sapiens
  Cyclin F ribozyme binding site
cccccaagtcccccggaga

SEQ ID NO: 2556 - DNA, 19 bp, Homo sapiens
  Cyclin F ribozyme binding site
gagcagtgttccccagcaa

SEQ ID NO: 2557 - DNA, 19 bp, Homo sapiens
  Cyclin F ribozyme binding site
agcagtgttccccagcaac

SEQ ID NO: 2558 - DNA, 19 bp, Homo sapiens
  Cyclin F ribozyme binding site
gaagcggataaacctatgc

SEQ ID NO: 2559 - DNA, 19 bp, Homo sapiens
  Cyclin F ribozyme binding site
gataaacctatgcatacac

SEQ ID NO: 2560 - DNA, 19 bp, Homo sapiens
  Cyclin F ribozyme binding site
cctatgcatacacagtgag

SEQ ID NO: 2561 - DNA, 19 bp, Homo sapiens
  Cyclin F ribozyme binding site
cctgggccttgtgaggctg

SEQ ID NO: 2562 - DNA, 19 bp, Homo sapiens
  Cyclin G1 ribozyme binding site
gggccgagttgtctcggcg

SEQ ID NO: 2563 - DNA, 19 bp, Homo sapiens
  Cyclin G1 ribozyme binding site
ccgagttgtctcggcggcg

SEQ ID NO: 2564 - DNA, 19 bp, Homo sapiens
  Cyclin G1 ribozyme binding site
ccgaggcctccacccagga

SEQ ID NO: 2565 - DNA, 19 bp, Homo sapiens
  Cyclin G1 ribozyme binding site
caggacagtccccctcccc

SEQ ID NO: 2566 - DNA, 19 bp, Homo sapiens
  Cyclin G1 ribozyme binding site
agtccccctccccgggcct

SEQ ID NO: 2567 - DNA, 19 bp, Homo sapiens
  Cyclin G1 ribozyme binding site
cccgggcctctctcctctt

SEQ ID NO: 2568 - DNA, 19 bp, Homo sapiens
  Cyclin G1 ribozyme binding site
cgggcctctctcctcttgc

SEQ ID NO: 2569 - DNA, 19 bp, Homo sapiens
  Cyclin G1 ribozyme binding site
ggcctctctcctcttgcct

SEQ ID NO: 2570 - DNA, 19 bp, Homo sapiens
  Cyclin G1 ribozyme binding site
ctctctcctcttgcctacg

SEQ ID NO: 2571 - DNA, 19 bp, Homo sapiens
  Cyclin G1 ribozyme binding site
ctctcctcttgcctacgag

SEQ ID NO: 2572 - DNA, 19 bp, Homo sapiens
  Cyclin G1 ribozyme binding site
ctcttgcctacgagtcccc

SEQ ID NO: 2573 - DNA, 19 bp, Homo sapiens
  Cyclin G1 ribozyme binding site
cctacgagtccccctctcc

SEQ ID NO: 2574 - DNA, 19 bp, Homo sapiens
  Cyclin G1 ribozyme binding site
agtccccctctcctcgtag

SEQ ID NO: 2575 - DNA, 19 bp, Homo sapiens
  Cyclin G1 ribozyme binding site
tccccctctcctcgtaggc

SEQ ID NO: 2576 - DNA, 19 bp, Homo sapiens
  Cyclin G1 ribozyme binding site
ccctctcctcgtaggcctc

SEQ ID NO: 2577 - DNA, 19 bp, Homo sapiens
  Cyclin G1 ribozyme binding site
tctcctcgtaggcctctcg

SEQ ID NO: 2578 - DNA, 19 bp, Homo sapiens
  Cyclin G1 ribozyme binding site
cgtaggcctctcggatctg

SEQ ID NO: 2579 - DNA, 19 bp, Homo sapiens
  Cyclin G1 ribozyme binding site
taggcctctcggatctgat

SEQ ID NO: 2580 - DNA, 19 bp, Homo sapiens
  Cyclin G1 ribozyme binding site
ctctcggatctgatatcgt

SEQ ID NO: 2581 - DNA, 19 bp, Homo sapiens
  Cyclin G1 ribozyme binding site
ggatctgatatcgtggggt

SEQ ID NO: 2582 - DNA, 19 bp, Homo sapiens
  Cyclin G1 ribozyme binding site
atctgatatcgtggggtga

SEQ ID NO: 2583 - DNA, 19 bp, Homo sapiens
  Cyclin G1 ribozyme binding site
gagggtggttaccgtgagg

SEQ ID NO: 2584 - DNA, 19 bp, Homo sapiens
  Cyclin G1 ribozyme binding site
agggtggttaccgtgagga

SEQ ID NO: 2585 - DNA, 19 bp, Homo sapiens
  Cyclin G1 ribozyme binding site
agctgcagtctctgtcaag

SEQ ID NO: 2586 - DNA, 19 bp, Homo sapiens
  Cyclin G1 ribozyme binding site
ctgcagtctctgtcaagat

SEQ ID NO: 2587 - DNA, 19 bp, Homo sapiens
  Cyclin G1 ribozyme binding site
agtctctgtcaagatgata

SEQ ID NO: 2588 - DNA, 19 bp, Homo sapiens
  Cyclin G1 ribozyme binding site
caagatgatagaggtactg

SEQ ID NO: 2589 - DNA, 19 bp, Homo sapiens
  Cyclin G1 ribozyme binding site
gatagaggtactgacaaca

SEQ ID NO: 2590 - DNA, 19 bp, Homo sapiens
  Cyclin G1 ribozyme binding site
caactgactctcagaaact

SEQ ID NO: 2591 - DNA, 19 bp, Homo sapiens
  Cyclin G1 ribozyme binding site
actgactctcagaaactgc

SEQ ID NO: 2592 - DNA, 19 bp, Homo sapiens
  Cyclin G1 ribozyme binding site
gaaactgctacaccagctg

SEQ ID NO: 2593 - DNA, 19 bp, Homo sapiens
  Cyclin G1 ribozyme binding site
atgccctgttggaacagga

SEQ ID NO: 2594 - DNA, 19 bp, Homo sapiens
  Cyclin G1 ribozyme binding site
aacaggagtctagatgtca

SEQ ID NO: 2595 - DNA, 19 bp, Homo sapiens
  Cyclin G1 ribozyme binding site
caggagtctagatgtcagc

SEQ ID NO: 2596 - DNA, 19 bp, Homo sapiens
  Cyclin G1 ribozyme binding site
tctagatgtcagccaaagg

SEQ ID NO: 2597 - DNA, 19 bp, Homo sapiens
  Cyclin G1 ribozyme binding site
gccaaaggtctgtggtttg

SEQ ID NO: 2598 - DNA, 19 bp, Homo sapiens
  Cyclin G1 ribozyme binding site
gtctgtggtttgagactaa

SEQ ID NO: 2599 - DNA, 19 bp, Homo sapiens
  Cyclin G1 ribozyme binding site
tctgtggtttgagactaat

SEQ ID NO: 2600 - DNA, 19 bp, Homo sapiens
  Cyclin G1 ribozyme binding site
tttgagactaattgagtct

SEQ ID NO: 2601 - DNA, 19 bp, Homo sapiens
  Cyclin G1 ribozyme binding site
gagactaattgagtctgca

SEQ ID NO: 2602 - DNA, 19 bp, Homo sapiens
  Cyclin G1 ribozyme binding site
taattgagtctgcacacga

SEQ ID NO: 2603 - DNA, 19 bp, Homo sapiens
  Cyclin G1 ribozyme binding site
gcacacgataatggcctca

SEQ ID NO: 2604 - DNA, 19 bp, Homo sapiens
  Cyclin G1 ribozyme binding site
taatggcctcagaatgact

SEQ ID NO: 2605 - DNA, 19 bp, Homo sapiens
  Cyclin G1 ribozyme binding site
tgcaagactaagggacttt

SEQ ID NO: 2606 - DNA, 19 bp, Homo sapiens
  Cyclin G1 ribozyme binding site
taagggactttgaagtaaa

SEQ ID NO: 2607 - DNA, 19 bp, Homo sapiens
  Cyclin G1 ribozyme binding site
aagggactttgaagtaaaa

SEQ ID NO: 2608 - DNA, 19 bp, Homo sapiens
  Cyclin G1 ribozyme binding site
ctttgaagtaaaagatctt

SEQ ID NO: 2609 - DNA, 19 bp, Homo sapiens
  Cyclin G1 ribozyme binding site
gtaaaagatcttcttagtc

SEQ ID NO: 2610 - DNA, 19 bp, Homo sapiens
  Cyclin G1 ribozyme binding site
aaaagatcttcttagtcta

SEQ ID NO: 2611 - DNA, 19 bp, Homo sapiens
  Cyclin G1 ribozyme binding site
aaagatcttcttagtctaa

SEQ ID NO: 2612 - DNA, 19 bp, Homo sapiens
  Cyclin G1 ribozyme binding site
agatcttcttagtctaact

SEQ ID NO: 2613 - DNA, 19 bp, Homo sapiens
  Cyclin G1 ribozyme binding site
gatcttcttagtctaactc

SEQ ID NO: 2614 - DNA, 19 bp, Homo sapiens
  Cyclin G1 ribozyme binding site
cttcttagtctaactcagt

SEQ ID NO: 2615 - DNA, 19 bp, Homo sapiens
  Cyclin G1 ribozyme binding site
tcttagtctaactcagttc

SEQ ID NO: 2616 - DNA, 19 bp, Homo sapiens
  Cyclin G1 ribozyme binding site
agtctaactcagttctttg

SEQ ID NO: 2617 - DNA, 19 bp, Homo sapiens
  Cyclin G1 ribozyme binding site
taactcagttctttggctt

SEQ ID NO: 2618 - DNA, 19 bp, Homo sapiens
  Cyclin G1 ribozyme binding site
aactcagttctttggcttt

SEQ ID NO: 2619 - DNA, 19 bp, Homo sapiens
  Cyclin G1 ribozyme binding site
ctcagttctttggctttga

SEQ ID NO: 2620 - DNA, 19 bp, Homo sapiens
  Cyclin G1 ribozyme binding site
tcagttctttggctttgac

SEQ ID NO: 2621 - DNA, 19 bp, Homo sapiens
  Cyclin G1 ribozyme binding site
tctttggctttgacacaga

SEQ ID NO: 2622 - DNA, 19 bp, Homo sapiens
  Cyclin G1 ribozyme binding site
ctttggctttgacacagag

SEQ ID NO: 2623 - DNA, 19 bp, Homo sapiens
  Cyclin G1 ribozyme binding site
cagagacattttctctagc

SEQ ID NO: 2624 - DNA, 19 bp, Homo sapiens
  Cyclin G1 ribozyme binding site
agagacattttctctagct

SEQ ID NO: 2625 - DNA, 19 bp, Homo sapiens
  Cyclin G1 ribozyme binding site
gagacattttctctagctg

SEQ ID NO: 2626 - DNA, 19 bp, Homo sapiens
  Cyclin G1 ribozyme binding site
agacattttctctagctgt

SEQ ID NO: 2627 - DNA, 19 bp, Homo sapiens
  Cyclin G1 ribozyme binding site
acattttctctagctgtga

SEQ ID NO: 2628 - DNA, 19 bp, Homo sapiens
  Cyclin G1 ribozyme binding site
attttctctagctgtgaat

SEQ ID NO: 2629 - DNA, 19 bp, Homo sapiens
  Cyclin G1 ribozyme binding site
gctgtgaatttactggaca

SEQ ID NO: 2630 - DNA, 19 bp, Homo sapiens
  Cyclin G1 ribozyme binding site
ctgtgaatttactggacag

SEQ ID NO: 2631 - DNA, 19 bp, Homo sapiens
  Cyclin G1 ribozyme binding site
tgtgaatttactggacaga

SEQ ID NO: 2632 - DNA, 19 bp, Homo sapiens
  Cyclin G1 ribozyme binding site
tggacagattcctgtctaa

SEQ ID NO: 2633 - DNA, 19 bp, Homo sapiens
  Cyclin G1 ribozyme binding site
ggacagattcctgtctaaa

SEQ ID NO: 2634 - DNA, 19 bp, Homo sapiens
  Cyclin G1 ribozyme binding site
gattcctgtctaaaatgaa

SEQ ID NO: 2635 - DNA, 19 bp, Homo sapiens
  Cyclin G1 ribozyme binding site
ttcctgtctaaaatgaagg

SEQ ID NO: 2636 - DNA, 19 bp, Homo sapiens
  Cyclin G1 ribozyme binding site
aatgaaggtacagcccaag

SEQ ID NO: 2637 - DNA, 19 bp, Homo sapiens
  Cyclin G1 ribozyme binding site
caagcaccttgggtgtgtt

SEQ ID NO: 2638 - DNA, 19 bp, Homo sapiens
  Cyclin G1 ribozyme binding site
tgggtgtgttggactgagc

SEQ ID NO: 2639 - DNA, 19 bp, Homo sapiens
  Cyclin G1 ribozyme binding site
tgagctgcttttatttggc

SEQ ID NO: 2640 - DNA, 19 bp, Homo sapiens
  Cyclin G1 ribozyme binding site
gagctgcttttatttggct

SEQ ID NO: 2641 - DNA, 19 bp, Homo sapiens
  Cyclin G1 ribozyme binding site
agctgcttttatttggctg

SEQ ID NO: 2642 - DNA, 19 bp, Homo sapiens
  Cyclin G1 ribozyme binding site
gctgcttttatttggctgt

SEQ ID NO: 2643 - DNA, 19 bp, Homo sapiens
  Cyclin G1 ribozyme binding site
tgcttttatttggctgtaa

SEQ ID NO: 2644 - DNA, 19 bp, Homo sapiens
  Cyclin G1 ribozyme binding site
gcttttatttggctgtaaa

SEQ ID NO: 2645 - DNA, 19 bp, Homo sapiens
  Cyclin G1 ribozyme binding site
tttggctgtaaaatcaata

SEQ ID NO: 2646 - DNA, 19 bp, Homo sapiens
  Cyclin G1 ribozyme binding site
ctgtaaaatcaatagaaga

SEQ ID NO: 2647 - DNA, 19 bp, Homo sapiens
  Cyclin G1 ribozyme binding site
aaaatcaatagaagaggaa

SEQ ID NO: 2648 - DNA, 19 bp, Homo sapiens
  Cyclin G1 ribozyme binding site
aaggaatgtcccattggca

SEQ ID NO: 2649 - DNA, 19 bp, Homo sapiens
  Cyclin G1 ribozyme binding site
atgtcccattggcaactga

SEQ ID NO: 2650 - DNA, 19 bp, Homo sapiens
  Cyclin G1 ribozyme binding site
caactgacttgatccgaat

SEQ ID NO: 2651 - DNA, 19 bp, Homo sapiens
  Cyclin G1 ribozyme binding site
tgacttgatccgaataagt

SEQ ID NO: 2652 - DNA, 19 bp, Homo sapiens
  Cyclin G1 ribozyme binding site
gatccgaataagtcaatat

SEQ ID NO: 2653 - DNA, 19 bp, Homo sapiens
  Cyclin G1 ribozyme binding site
cgaataagtcaatataggt

SEQ ID NO: 2654 - DNA, 19 bp, Homo sapiens
  Cyclin G1 ribozyme binding site
taagtcaatataggtttac

SEQ ID NO: 2655 - DNA, 19 bp, Homo sapiens
  Cyclin G1 ribozyme binding site
agtcaatataggtttacgg

SEQ ID NO: 2656 - DNA, 19 bp, Homo sapiens
  Cyclin G1 ribozyme binding site
aatataggtttacggtttc

SEQ ID NO: 2657 - DNA, 19 bp, Homo sapiens
  Cyclin G1 ribozyme binding site
atataggtttacggtttca

SEQ ID NO: 2658 - DNA, 19 bp, Homo sapiens
  Cyclin G1 ribozyme binding site
tataggtttacggtttcag

SEQ ID NO: 2659 - DNA, 19 bp, Homo sapiens
  Cyclin G1 ribozyme binding site
gtttacggtttcagacttg

SEQ ID NO: 2660 - DNA, 19 bp, Homo sapiens
  Cyclin G1 ribozyme binding site
tttacggtttcagacttga

SEQ ID NO: 2661 - DNA, 19 bp, Homo sapiens
  Cyclin G1 ribozyme binding site
ttacggtttcagacttgat

SEQ ID NO: 2662 - DNA, 19 bp, Homo sapiens
  Cyclin G1 ribozyme binding site
tttcagacttgatgagaat

SEQ ID NO: 2663 - DNA, 19 bp, Homo sapiens
  Cyclin G1 ribozyme binding site
ggaaaagattgtattggag

SEQ ID NO: 2664 - DNA, 19 bp, Homo sapiens
  Cyclin G1 ribozyme binding site
aaagattgtattggagaag

SEQ ID NO: 2665 - DNA, 19 bp, Homo sapiens
  Cyclin G1 ribozyme binding site
agattgtattggagaaggt

SEQ ID NO: 2666 - DNA, 19 bp, Homo sapiens
  Cyclin G1 ribozyme binding site
aaggtgtgttggaaagtca

SEQ ID NO: 2667 - DNA, 19 bp, Homo sapiens
  Cyclin G1 ribozyme binding site
ttggaaagtcaaagctact

SEQ ID NO: 2668 - DNA, 19 bp, Homo sapiens
  Cyclin G1 ribozyme binding site
gtcaaagctactactgcct

SEQ ID NO: 2669 - DNA, 19 bp, Homo sapiens
  Cyclin G1 ribozyme binding site
aaagctactactgcctttc

SEQ ID NO: 2670 - DNA, 19 bp, Homo sapiens
  Cyclin G1 ribozyme binding site
ctactgcctttcaatttct

SEQ ID NO: 2671 - DNA, 19 bp, Homo sapiens
  Cyclin G1 ribozyme binding site
tactgcctttcaatttctg

SEQ ID NO: 2672 - DNA, 19 bp, Homo sapiens
  Cyclin G1 ribozyme binding site
actgcctttcaatttctgc

SEQ ID NO: 2673 - DNA, 19 bp, Homo sapiens
  Cyclin G1 ribozyme binding site
cctttcaatttctgcaact

SEQ ID NO: 2674 - DNA, 19 bp, Homo sapiens
  Cyclin G1 ribozyme binding site
ctttcaatttctgcaactg

SEQ ID NO: 2675 - DNA, 19 bp, Homo sapiens
  Cyclin G1 ribozyme binding site
tttcaatttctgcaactgt

SEQ ID NO: 2676 - DNA, 19 bp, Homo sapiens
  Cyclin G1 ribozyme binding site
tgcaactgtattattcact

SEQ ID NO: 2677 - DNA, 19 bp, Homo sapiens
  Cyclin G1 ribozyme binding site
caactgtattattcactcc

SEQ ID NO: 2678 - DNA, 19 bp, Homo sapiens
  Cyclin G1 ribozyme binding site
aactgtattattcactcct

SEQ ID NO: 2679 - DNA, 19 bp, Homo sapiens
  Cyclin G1 ribozyme binding site
ctgtattattcactccttc

SEQ ID NO: 2680 - DNA, 19 bp, Homo sapiens
  Cyclin G1 ribozyme binding site
tgtattattcactccttca

SEQ ID NO: 2681 - DNA, 19 bp, Homo sapiens
  Cyclin G1 ribozyme binding site
ttattcactccttcaagag

SEQ ID NO: 2682 - DNA, 19 bp, Homo sapiens
  Cyclin G1 ribozyme binding site
ttcactccttcaagagaac

SEQ ID NO: 2683 - DNA, 19 bp, Homo sapiens
  Cyclin G1 ribozyme binding site
tcactccttcaagagaact

SEQ ID NO: 2684 - DNA, 19 bp, Homo sapiens
  Cyclin G1 ribozyme binding site
aagagaacttgccacttga

SEQ ID NO: 2685 - DNA, 19 bp, Homo sapiens
  Cyclin G1 ribozyme binding site
cttgccacttgaaaggaga

SEQ ID NO: 2686 - DNA, 19 bp, Homo sapiens
  Cyclin G1 ribozyme binding site
aggagaaatagcattaatt

SEQ ID NO: 2687 - DNA, 19 bp, Homo sapiens
  Cyclin G1 ribozyme binding site
aaatagcattaattttgaa

SEQ ID NO: 2688 - DNA, 19 bp, Homo sapiens
  Cyclin G1 ribozyme binding site
agcattaattttgaaagac

SEQ ID NO: 2689 - DNA, 19 bp, Homo sapiens
  Cyclin G1 ribozyme binding site
gcattaattttgaaagact

SEQ ID NO: 2690 - DNA, 19 bp, Homo sapiens
  Cyclin G1 ribozyme binding site
cattaattttgaaagacta

SEQ ID NO: 2691 - DNA, 19 bp, Homo sapiens
  Cyclin G1 ribozyme binding site
tgaaagactagaagctcaa

SEQ ID NO: 2692 - DNA, 19 bp, Homo sapiens
  Cyclin G1 ribozyme binding site
ctagaagctcaactgaagg

SEQ ID NO: 2693 - DNA, 19 bp, Homo sapiens
  Cyclin G1 ribozyme binding site
aaggcatgtcattgcagga

SEQ ID NO: 2694 - DNA, 19 bp, Homo sapiens
  Cyclin G1 ribozyme binding site
gcatgtcattgcaggatca

SEQ ID NO: 2695 - DNA, 19 bp, Homo sapiens
  Cyclin G1 ribozyme binding site
ttgcaggatcatattttct

SEQ ID NO: 2696 - DNA, 19 bp, Homo sapiens
  Cyclin G1 ribozyme binding site
caggatcatattttctaaa

SEQ ID NO: 2697 - DNA, 19 bp, Homo sapiens
  Cyclin G1 ribozyme binding site
ggatcatattttctaaagc

SEQ ID NO: 2698 - DNA, 19 bp, Homo sapiens
  Cyclin G1 ribozyme binding site
gatcatattttctaaagca

SEQ ID NO: 2699 - DNA, 19 bp, Homo sapiens
  Cyclin G1 ribozyme binding site
atcatattttctaaagcaa

SEQ ID NO: 2700 - DNA, 19 bp, Homo sapiens
  Cyclin G1 ribozyme binding site
tcatattttctaaagcaaa

SEQ ID NO: 2701 - DNA, 19 bp, Homo sapiens
  Cyclin G1 ribozyme binding site
atattttctaaagcaaagc

SEQ ID NO: 2702 - DNA, 19 bp, Homo sapiens
  Cyclin G1 ribozyme binding site
gcaaagccttctgtgttgg

SEQ ID NO: 2703 - DNA, 19 bp, Homo sapiens
  Cyclin G1 ribozyme binding site
caaagccttctgtgttggc

SEQ ID NO: 2704 - DNA, 19 bp, Homo sapiens
  Cyclin G1 ribozyme binding site
cttctgtgttggcattgtc

SEQ ID NO: 2705 - DNA, 19 bp, Homo sapiens
  Cyclin G1 ribozyme binding site
tgttggcattgtctatcat

SEQ ID NO: 2706 - DNA, 19 bp, Homo sapiens
  Cyclin G1 ribozyme binding site
tggcattgtctatcattgc

SEQ ID NO: 2707 - DNA, 19 bp, Homo sapiens
  Cyclin G1 ribozyme binding site
gcattgtctatcattgcat

SEQ ID NO: 2708 - DNA, 19 bp, Homo sapiens
  Cyclin G1 ribozyme binding site
attgtctatcattgcatta

SEQ ID NO: 2709 - DNA, 19 bp, Homo sapiens
  Cyclin G1 ribozyme binding site
gtctatcattgcattagag

SEQ ID NO: 2710 - DNA, 19 bp, Homo sapiens
  Cyclin G1 ribozyme binding site
tcattgcattagagatcca

SEQ ID NO: 2711 - DNA, 19 bp, Homo sapiens
  Cyclin G1 ribozyme binding site
cattgcattagagatccaa

SEQ ID NO: 2712 - DNA, 19 bp, Homo sapiens
  Cyclin G1 ribozyme binding site
attagagatccaagcacag

SEQ ID NO: 2713 - DNA, 19 bp, Homo sapiens
  Cyclin G1 ribozyme binding site
gaagtgtgtagagttaaca

SEQ ID NO: 2714 - DNA, 19 bp, Homo sapiens
  Cyclin G1 ribozyme binding site
gtgtagagttaacagaagg

SEQ ID NO: 2715 - DNA, 19 bp, Homo sapiens
  Cyclin G1 ribozyme binding site
tgtagagttaacagaagga

SEQ ID NO: 2716 - DNA, 19 bp, Homo sapiens
  Cyclin G1 ribozyme binding site
agaaggaatagaatgtctt

SEQ ID NO: 2717 - DNA, 19 bp, Homo sapiens
  Cyclin G1 ribozyme binding site
atagaatgtcttcagaaac

SEQ ID NO: 2718 - DNA, 19 bp, Homo sapiens
  Cyclin G1 ribozyme binding site
agaatgtcttcagaaacat

SEQ ID NO: 2719 - DNA, 19 bp, Homo sapiens
  Cyclin G1 ribozyme binding site
gaatgtcttcagaaacatt

SEQ ID NO: 2720 - DNA, 19 bp, Homo sapiens
  Cyclin G1 ribozyme binding site
cagaaacattccaagataa

SEQ ID NO: 2721 - DNA, 19 bp, Homo sapiens
  Cyclin G1 ribozyme binding site
agaaacattccaagataaa

SEQ ID NO: 2722 - DNA, 19 bp, Homo sapiens
  Cyclin G1 ribozyme binding site
ttccaagataaatggcaga

SEQ ID NO: 2723 - DNA, 19 bp, Homo sapiens
  Cyclin G1 ribozyme binding site
ggcagagatctgaccttct

SEQ ID NO: 2724 - DNA, 19 bp, Homo sapiens
  Cyclin G1 ribozyme binding site
atctgaccttctggcaaga

SEQ ID NO: 2725 - DNA, 19 bp, Homo sapiens
  Cyclin G1 ribozyme binding site
tctgaccttctggcaagag

SEQ ID NO: 2726 - DNA, 19 bp, Homo sapiens
  Cyclin G1 ribozyme binding site
gcaagagcttgtatccaaa

SEQ ID NO: 2727 - DNA, 19 bp, Homo sapiens
  Cyclin G1 ribozyme binding site
agagcttgtatccaaatgt

SEQ ID NO: 2728 - DNA, 19 bp, Homo sapiens
  Cyclin G1 ribozyme binding site
agcttgtatccaaatgttt

SEQ ID NO: 2729 - DNA, 19 bp, Homo sapiens
  Cyclin G1 ribozyme binding site
tccaaatgtttaactgaat

SEQ ID NO: 2730 - DNA, 19 bp, Homo sapiens
  Cyclin G1 ribozyme binding site
ccaaatgtttaactgaata

SEQ ID NO: 2731 - DNA, 19 bp, Homo sapiens
  Cyclin G1 ribozyme binding site
caaatgtttaactgaatat

SEQ ID NO: 2732 - DNA, 19 bp, Homo sapiens
  Cyclin G1 ribozyme binding site
taactgaatattcatcaaa

SEQ ID NO: 2733 - DNA, 19 bp, Homo sapiens
  Cyclin G1 ribozyme binding site
actgaatattcatcaaata

SEQ ID NO: 2734 - DNA, 19 bp, Homo sapiens
  Cyclin G1 ribozyme binding site
ctgaatattcatcaaataa

SEQ ID NO: 2735 - DNA, 19 bp, Homo sapiens
  Cyclin G1 ribozyme binding site
aatattcatcaaataagtg

SEQ ID NO: 2736 - DNA, 19 bp, Homo sapiens
  Cyclin G1 ribozyme binding site
tcatcaaataagtgttcca

SEQ ID NO: 2737 - DNA, 19 bp, Homo sapiens
  Cyclin G1 ribozyme binding site
aataagtgttccaaaccaa

SEQ ID NO: 2738 - DNA, 19 bp, Homo sapiens
  Cyclin G1 ribozyme binding site
ataagtgttccaaaccaaa

SEQ ID NO: 2739 - DNA, 19 bp, Homo sapiens
  Cyclin G1 ribozyme binding site
accaaatgttcagaagttg

SEQ ID NO: 2740 - DNA, 19 bp, Homo sapiens
  Cyclin G1 ribozyme binding site
ccaaatgttcagaagttga

SEQ ID NO: 2741 - DNA, 19 bp, Homo sapiens
  Cyclin G1 ribozyme binding site
ttcagaagttgaaatggat

SEQ ID NO: 2742 - DNA, 19 bp, Homo sapiens
  Cyclin G1 ribozyme binding site
gaaatggattgtttctggg

SEQ ID NO: 2743 - DNA, 19 bp, Homo sapiens
  Cyclin G1 ribozyme binding site
atggattgtttctgggcgt

SEQ ID NO: 2744 - DNA, 19 bp, Homo sapiens
  Cyclin G1 ribozyme binding site
tggattgtttctgggcgta

SEQ ID NO: 2745 - DNA, 19 bp, Homo sapiens
  Cyclin G1 ribozyme binding site
ggattgtttctgggcgtac

SEQ ID NO: 2746 - DNA, 19 bp, Homo sapiens
  Cyclin G1 ribozyme binding site
tctgggcgtactgcacggc

SEQ ID NO: 2747 - DNA, 19 bp, Homo sapiens
  Cyclin G1 ribozyme binding site
cacggcaattgaagcatag

SEQ ID NO: 2748 - DNA, 19 bp, Homo sapiens
  Cyclin G1 ribozyme binding site
ttgaagcatagctactaca

SEQ ID NO: 2749 - DNA, 19 bp, Homo sapiens
  Cyclin G1 ribozyme binding site
agcatagctactacagaat

SEQ ID NO: 2750 - DNA, 19 bp, Homo sapiens
  Cyclin G1 ribozyme binding site
atagctactacagaataac

SEQ ID NO: 2751 - DNA, 19 bp, Homo sapiens
  Cyclin G1 ribozyme binding site
ctacagaataactcacctt

SEQ ID NO: 2752 - DNA, 19 bp, Homo sapiens
  Cyclin G1 ribozyme binding site
agaataactcaccttccaa

SEQ ID NO: 2753 - DNA, 19 bp, Homo sapiens
  Cyclin G1 ribozyme binding site
aactcaccttccaacaatt

SEQ ID NO: 2754 - DNA, 19 bp, Homo sapiens
  Cyclin G1 ribozyme binding site
actcaccttccaacaattc

SEQ ID NO: 2755 - DNA, 19 bp, Homo sapiens
  Cyclin G1 ribozyme binding site
tccaacaattcctgaaatg

SEQ ID NO: 2756 - DNA, 19 bp, Homo sapiens
  Cyclin G1 ribozyme binding site
ccaacaattcctgaaatgg

SEQ ID NO: 2757 - DNA, 19 bp, Homo sapiens
  Cyclin G1 ribozyme binding site
tgaaatggtcccttaactg

SEQ ID NO: 2758 - DNA, 19 bp, Homo sapiens
  Cyclin G1 ribozyme binding site
atggtcccttaactggatt

SEQ ID NO: 2759 - DNA, 19 bp, Homo sapiens
  Cyclin G1 ribozyme binding site
tggtcccttaactggatta

SEQ ID NO: 2760 - DNA, 19 bp, Homo sapiens
  Cyclin G1 ribozyme binding site
taactggattattacagca

SEQ ID NO: 2761 - DNA, 19 bp, Homo sapiens
  Cyclin G1 ribozyme binding site
aactggattattacagcac

SEQ ID NO: 2762 - DNA, 19 bp, Homo sapiens
  Cyclin G1 ribozyme binding site
ctggattattacagcacca

SEQ ID NO: 2763 - DNA, 19 bp, Homo sapiens
  Cyclin G1 ribozyme binding site
tggattattacagcaccaa

SEQ ID NO: 2764 - DNA, 19 bp, Homo sapiens
  Cyclin G1 ribozyme binding site
caaaaaacttctctgaagc

SEQ ID NO: 2765 - DNA, 19 bp, Homo sapiens
  Cyclin G1 ribozyme binding site
aaaaaacttctctgaagcc

SEQ ID NO: 2766 - DNA, 19 bp, Homo sapiens
  Cyclin G1 ribozyme binding site
aaaacttctctgaagcctt

SEQ ID NO: 2767 - DNA, 19 bp, Homo sapiens
  Cyclin G1 ribozyme binding site
ctgaagcctttctccacaa

SEQ ID NO: 2768 - DNA, 19 bp, Homo sapiens
  Cyclin G1 ribozyme binding site
tgaagcctttctccacaac

SEQ ID NO: 2769 - DNA, 19 bp, Homo sapiens
  Cyclin G1 ribozyme binding site
gaagcctttctccacaacc

SEQ ID NO: 2770 - DNA, 19 bp, Homo sapiens
  Cyclin G1 ribozyme binding site
agcctttctccacaacctt

SEQ ID NO: 2771 - DNA, 19 bp, Homo sapiens
  Cyclin G1 ribozyme binding site
ccacaaccttgttctatgg

SEQ ID NO: 2772 - DNA, 19 bp, Homo sapiens
  Cyclin G1 ribozyme binding site
caaccttgttctatggatt

SEQ ID NO: 2773 - DNA, 19 bp, Homo sapiens
  Cyclin G1 ribozyme binding site
aaccttgttctatggattc

SEQ ID NO: 2774 - DNA, 19 bp, Homo sapiens
  Cyclin G1 ribozyme binding site
ccttgttctatggattcca

SEQ ID NO: 2775 - DNA, 19 bp, Homo sapiens
  Cyclin G1 ribozyme binding site
tctatggattccataatgt

SEQ ID NO: 2776 - DNA, 19 bp, Homo sapiens
  Cyclin G1 ribozyme binding site
ctatggattccataatgtt

SEQ ID NO: 2777 - DNA, 19 bp, Homo sapiens
  Cyclin G1 ribozyme binding site
ggattccataatgttacaa

SEQ ID NO: 2778 - DNA, 19 bp, Homo sapiens
  Cyclin G1 ribozyme binding site
ccataatgttacaatggat

SEQ ID NO: 2779 - DNA, 19 bp, Homo sapiens
  Cyclin G1 ribozyme binding site
cataatgttacaatggatt

SEQ ID NO: 2780 - DNA, 19 bp, Homo sapiens
  Cyclin G1 ribozyme binding site
acaatggatttaaagctat

SEQ ID NO: 2781 - DNA, 19 bp, Homo sapiens
  Cyclin G1 ribozyme binding site
caatggatttaagctatga

SEQ ID NO: 2782 - DNA, 19 bp, Homo sapiens
  Cyclin G1 ribozyme binding site
aatggatttaagctatgaa

SEQ ID NO: 2783 - DNA, 19 bp, Homo sapiens
  Cyclin G1 ribozyme binding site
atttaagctatgaagctca

SEQ ID NO: 2784 - DNA, 19 bp, Homo sapiens
  Cyclin G1 ribozyme binding site
tatgaagctcaaacatcac

SEQ ID NO: 2785 - DNA, 19 bp, Homo sapiens
  Cyclin G1 ribozyme binding site
ctcaaacatcacgagataa

SEQ ID NO: 2786 - DNA, 19 bp, Homo sapiens
  Cyclin G1 ribozyme binding site
tcacgagataagcatgatg

SEQ ID NO: 2787 - DNA, 19 bp, Homo sapiens
  Cyclin G1 ribozyme binding site
catgatggtctcagcttgg

SEQ ID NO: 2788 - DNA, 19 bp, Homo sapiens
  Cyclin H ribozyme binding site
cacaacagtagtcagaagc

SEQ ID NO: 2789 - DNA, 19 bp, Homo sapiens
  Cyclin H ribozyme binding site
aacagtagtcagaagcggc

SEQ ID NO: 2790 - DNA, 19 bp, Homo sapiens
  Cyclin H ribozyme binding site
actggaccttctccagcga

SEQ ID NO: 2791 - DNA, 19 bp, Homo sapiens
  Cyclin H ribozyme binding site
ggaccttctccagcgagga

SEQ ID NO: 2792 - DNA, 19 bp, Homo sapiens
  Cyclin H ribozyme binding site
accgcaaattcagatgcaa

SEQ ID NO: 2793 - DNA, 19 bp, Homo sapiens
  Cyclin H ribozyme binding site
ccgcaaattcagatgcaaa

SEQ ID NO: 2794 - DNA, 19 bp, Homo sapiens
  Cyclin H ribozyme binding site
cgggaaggttcttccgaat

SEQ ID NO: 2795 - DNA, 19 bp, Homo sapiens
  Cyclin H ribozyme binding site
gggaaggttcttccgaatg

SEQ ID NO: 2796 - DNA, 19 bp, Homo sapiens
  Cyclin H ribozyme binding site
gaaggttcttccgaatgat

SEQ ID NO: 2797 - DNA, 19 bp, Homo sapiens
  Cyclin H ribozyme binding site
aaggttcttccgaatgatc

SEQ ID NO: 2798 - DNA, 19 bp, Homo sapiens
  Cyclin H ribozyme binding site
ccgaatgatccagtctttc

SEQ ID NO: 2799 - DNA, 19 bp, Homo sapiens
  Cyclin H ribozyme binding site
tgatccagtctttcttgag

SEQ ID NO: 2800 - DNA, 19 bp, Homo sapiens
  Cyclin H ribozyme binding site
atccagtctttcttgagcc

SEQ ID NO: 2801 - DNA, 19 bp, Homo sapiens
  Cyclin H ribozyme binding site
tccagtctttcttgagcct

SEQ ID NO: 2802 - DNA, 19 bp, Homo sapiens
  Cyclin H ribozyme binding site
ccagtctttcttgagcctc

SEQ ID NO: 2803 - DNA, 19 bp, Homo sapiens
  Cyclin H ribozyme binding site
agtctttcttgagcctcat

SEQ ID NO: 2804 - DNA, 19 bp, Homo sapiens
  Cyclin H ribozyme binding site
cttgagcctcatgaagaaa

SEQ ID NO: 2805 - DNA, 19 bp, Homo sapiens
  Cyclin H ribozyme binding site
aatgacactctgcaaatac

SEQ ID NO: 2806 - DNA, 19 bp, Homo sapiens
  Cyclin H ribozyme binding site
tctgcaaatactatgagaa

SEQ ID NO: 2807 - DNA, 19 bp, Homo sapiens
  Cyclin H ribozyme binding site
gcaaatactatgagaaaag

SEQ ID NO: 2808 - DNA, 19 bp, Homo sapiens
  Cyclin H ribozyme binding site
agaaaaggttattggaatt

SEQ ID NO: 2809 - DNA, 19 bp, Homo sapiens
  Cyclin H ribozyme binding site
gaaaaggttattggaattc

SEQ ID NO: 2810 - DNA, 19 bp, Homo sapiens
  Cyclin H ribozyme binding site
aaaggttattggaattctg

SEQ ID NO: 2811 - DNA, 19 bp, Homo sapiens
  Cyclin H ribozyme binding site
tattggaattctgttcggt

SEQ ID NO: 2812 - DNA, 19 bp, Homo sapiens
  Cyclin H ribozyme binding site
attggaattctgttcggtg

SEQ ID NO: 2813 - DNA, 19 bp, Homo sapiens
  Cyclin H ribozyme binding site
gaattctgttcggtgttta

SEQ ID NO: 2814 - DNA, 19 bp, Homo sapiens
  Cyclin H ribozyme binding site
aattctgttcggtgtttaa

SEQ ID NO: 2815 - DNA, 19 bp, Homo sapiens
  Cyclin H ribozyme binding site
gttcggtgtttaagccagc

SEQ ID NO: 2816 - DNA, 19 bp, Homo sapiens
  Cyclin H ribozyme binding site
ttcggtgtttaagccagca

SEQ ID NO: 2817 - DNA, 19 bp, Homo sapiens
  Cyclin H ribozyme binding site
tcggtgtttaagccagcaa

SEQ ID NO: 2818 - DNA, 19 bp, Homo sapiens
  Cyclin H ribozyme binding site
tgccaagatctgttgtggg

SEQ ID NO: 2819 - DNA, 19 bp, Homo sapiens
  Cyclin H ribozyme binding site
aagatctgttgtgggtacg

SEQ ID NO: 2820 - DNA, 19 bp, Homo sapiens
  Cyclin H ribozyme binding site
gttgtgggtacggcttgta

SEQ ID NO: 2821 - DNA, 19 bp, Homo sapiens
  Cyclin H ribozyme binding site
ggtacggcttgtatgtatt

SEQ ID NO: 2822 - DNA, 19 bp, Homo sapiens
  Cyclin H ribozyme binding site
acggcttgtatgtatttca

SEQ ID NO: 2823 - DNA, 19 bp, Homo sapiens
  Cyclin H ribozyme binding site
cttgtatgtatttcaaacg

SEQ ID NO: 2824 - DNA, 19 bp, Homo sapiens
  Cyclin H ribozyme binding site
tgtatgtatttcaaacgtt

SEQ ID NO: 2825 - DNA, 19 bp, Homo sapiens
  Cyclin H ribozyme binding site
gtatgtatttcaaacgttt

SEQ ID NO: 2826 - DNA, 19 bp, Homo sapiens
  Cyclin H ribozyme binding site
tatgtatttcaaacgtttt

SEQ ID NO: 2827 - DNA, 19 bp, Homo sapiens
  Cyclin H ribozyme binding site
ttcaaacgtttttatctta

SEQ ID NO: 2828 - DNA, 19 bp, Homo sapiens
  Cyclin H ribozyme binding site
tcaaacgtttttatcttaa

SEQ ID NO: 2829 - DNA, 19 bp, Homo sapiens
  Cyclin H ribozyme binding site
caaacgtttttatcttaat

SEQ ID NO: 2830 - DNA, 19 bp, Homo sapiens
  Cyclin H ribozyme binding site
aaacgtttttatcttaata

SEQ ID NO: 2831 - DNA, 19 bp, Homo sapiens
  Cyclin H ribozyme binding site
aacgtttttatcttaataa

SEQ ID NO: 2832 - DNA, 19 bp, Homo sapiens
  Cyclin H ribozyme binding site
cgtttttatcttaataact

SEQ ID NO: 2833 - DNA, 19 bp, Homo sapiens
  Cyclin H ribozyme binding site
tttttatcttaataactca

SEQ ID NO: 2834 - DNA, 19 bp, Homo sapiens
  Cyclin H ribozyme binding site
ttttatcttaataactcag

SEQ ID NO: 2835 - DNA, 19 bp, Homo sapiens
  Cyclin H ribozyme binding site
tatcttaataactcagtaa

SEQ ID NO: 2836 - DNA, 19 bp, Homo sapiens
  Cyclin H ribozyme binding site
ttaataactcagtaatgga

SEQ ID NO: 2837 - DNA, 19 bp, Homo sapiens
  Cyclin H ribozyme binding site
taactcagtaatggaatat

SEQ ID NO: 2838 - DNA, 19 bp, Homo sapiens
  Cyclin H ribozyme binding site
taatggaatatcaccccag

SEQ ID NO: 2839 - DNA, 19 bp, Homo sapiens
  Cyclin H ribozyme binding site
atggaatatcaccccagga

SEQ ID NO: 2840 - DNA, 19 bp, Homo sapiens
  Cyclin H ribozyme binding site
ccccaggataataatgctc

SEQ ID NO: 2841 - DNA, 19 bp, Homo sapiens
  Cyclin H ribozyme binding site
caggataataatgctcact

SEQ ID NO: 2842 - DNA, 19 bp, Homo sapiens
  Cyclin H ribozyme binding site
aataatgctcacttgtgca

SEQ ID NO: 2843 - DNA, 19 bp, Homo sapiens
  Cyclin H ribozyme binding site
atgctcacttgtgcatttt

SEQ ID NO: 2844 - DNA, 19 bp, Homo sapiens
  Cyclin H ribozyme binding site
cttgtgcatttttggcctg

SEQ ID NO: 2845 - DNA, 19 bp, Homo sapiens
  Cyclin H ribozyme binding site
ttgtgcatttttggcctgc

SEQ ID NO: 2846 - DNA, 19 bp, Homo sapiens
  Cyclin H ribozyme binding site
tgtgcatttttggcctgca

SEQ ID NO: 2847 - DNA, 19 bp, Homo sapiens
  Cyclin H ribozyme binding site
gtgcatttttggcctgcaa

SEQ ID NO: 2848 - DNA, 19 bp, Homo sapiens
  Cyclin H ribozyme binding site
ctgcaaagtagatgaattc

SEQ ID NO: 2849 - DNA, 19 bp, Homo sapiens
  Cyclin H ribozyme binding site
tagatgaattcaatgtatc

SEQ ID NO: 2850 - DNA, 19 bp, Homo sapiens
  Cyclin H ribozyme binding site
agatgaattcaatgtatct

SEQ ID NO: 2851 - DNA, 19 bp, Homo sapiens
  Cyclin H ribozyme binding site
attcaatgtatctagtcct

SEQ ID NO: 2852 - DNA, 19 bp, Homo sapiens
  Cyclin H ribozyme binding site
tcaatgtatctagtcctca

SEQ ID NO: 2853 - DNA, 19 bp, Homo sapiens
  Cyclin H ribozyme binding site
aatgtatctagtcctcagt

SEQ ID NO: 2854 - DNA, 19 bp, Homo sapiens
  Cyclin H ribozyme binding site
gtatctagtcctcagtttg

SEQ ID NO: 2855 - DNA, 19 bp, Homo sapiens
  Cyclin H ribozyme binding site
tctagtcctcagtttgttg

SEQ ID NO: 2856 - DNA, 19 bp, Homo sapiens
  Cyclin H ribozyme binding site
gtcctcagtttgttggaaa

SEQ ID NO: 2857 - DNA, 19 bp, Homo sapiens
  Cyclin H ribozyme binding site
tcctcagtttgttggaaac

SEQ ID NO: 2858 - DNA, 19 bp, Homo sapiens
  Cyclin H ribozyme binding site
tcagtttgttggaaacctc

SEQ ID NO: 2859 - DNA, 19 bp, Homo sapiens
  Cyclin H ribozyme binding site
tggaaacctccgggagagt

SEQ ID NO: 2860 - DNA, 19 bp, Homo sapiens
  Cyclin H ribozyme binding site
cgggagagtcctcttggac

SEQ ID NO: 2861 - DNA, 19 bp, Homo sapiens
  Cyclin H ribozyme binding site
gagagtcctcttggacagg

SEQ ID NO: 2862 - DNA, 19 bp, Homo sapiens
  Cyclin H ribozyme binding site
gagtcctcttggacaggag

SEQ ID NO: 2863 - DNA, 19 bp, Homo sapiens
  Cyclin H ribozyme binding site
gaaggcacttgaacagata

SEQ ID NO: 2864 - DNA, 19 bp, Homo sapiens
  Cyclin H ribozyme binding site
tgaacagatactggaatat

SEQ ID NO: 2865 - DNA, 19 bp, Homo sapiens
  Cyclin H ribozyme binding site
tactggaatatgaactact

SEQ ID NO: 2866 - DNA, 19 bp, Homo sapiens
  Cyclin H ribozyme binding site
atatgaactacttcttata

SEQ ID NO: 2867 - DNA, 19 bp, Homo sapiens
  Cyclin H ribozyme binding site
tgaactacttcttatacag

SEQ ID NO: 2868 - DNA, 19 bp, Homo sapiens
  Cyclin H ribozyme binding site
actacttcttatacagcaa

SEQ ID NO: 2869 - DNA, 19 bp, Homo sapiens
  Cyclin H ribozyme binding site
ctacttcttatacagcaac

SEQ ID NO: 2870 - DNA, 19 bp, Homo sapiens
  Cyclin H ribozyme binding site
acttcttatacagcaactt

SEQ ID NO: 2871 - DNA, 19 bp, Homo sapiens
  Cyclin H ribozyme binding site
acagcaacttaatttccac

SEQ ID NO: 2872 - DNA, 19 bp, Homo sapiens
  Cyclin H ribozyme binding site
cagcaacttaatttccacc

SEQ ID NO: 2873 - DNA, 19 bp, Homo sapiens
  Cyclin H ribozyme binding site
caacttaatttccacctta

SEQ ID NO: 2874 - DNA, 19 bp, Homo sapiens
  Cyclin H ribozyme binding site
aacttaatttccaccttat

SEQ ID NO: 2875 - DNA, 19 bp, Homo sapiens
  Cyclin H ribozyme binding site
acttaatttccaccttatt

SEQ ID NO: 2876 - DNA, 19 bp, Homo sapiens
  Cyclin H ribozyme binding site
tttccaccttattgtccac

SEQ ID NO: 2877 - DNA, 19 bp, Homo sapiens
  Cyclin H ribozyme binding site
ttccaccttattgtccaca

SEQ ID NO: 2878 - DNA, 19 bp, Homo sapiens
  Cyclin H ribozyme binding site
ccaccttattgtccacaat

SEQ ID NO: 2879 - DNA, 19 bp, Homo sapiens
  Cyclin H ribozyme binding site
ccttattgtccacaatcct

SEQ ID NO: 2880 - DNA, 19 bp, Homo sapiens
  Cyclin H ribozyme binding site
gtccacaatccttacagac

SEQ ID NO: 2881 - DNA, 19 bp, Homo sapiens
  Cyclin H ribozyme binding site
cacaatccttacagaccat

SEQ ID NO: 2882 - DNA, 19 bp, Homo sapiens
  Cyclin H ribozyme binding site
acaatccttacagaccatt

SEQ ID NO: 2883 - DNA, 19 bp, Homo sapiens
  Cyclin H ribozyme binding site
acagaccatttgagggctt

SEQ ID NO: 2884 - DNA, 19 bp, Homo sapiens
  Cyclin H ribozyme binding site
cagaccatttgagggcttc

SEQ ID NO: 2885 - DNA, 19 bp, Homo sapiens
  Cyclin H ribozyme binding site
ttgagggcttcctcatcga

SEQ ID NO: 2886 - DNA, 19 bp, Homo sapiens
  Cyclin H ribozyme binding site
tgagggcttcctcatcgac

SEQ ID NO: 2887 - DNA, 19 bp, Homo sapiens
  Cyclin H ribozyme binding site
gggcttcctcatcgactta

SEQ ID NO: 2888 - DNA, 19 bp, Homo sapiens
  Cyclin H ribozyme binding site
cttcctcatcgacttaaag

SEQ ID NO: 2889 - DNA, 19 bp, Homo sapiens
  Cyclin H ribozyme binding site
tcatcgacttaaagacccg

SEQ ID NO: 2890 - DNA, 19 bp, Homo sapiens
  Cyclin H ribozyme binding site
catcgacttaaagacccgc

SEQ ID NO: 2891 - DNA, 19 bp, Homo sapiens
  Cyclin H ribozyme binding site
agacccgctatcccatatt

SEQ ID NO: 2892 - DNA, 19 bp, Homo sapiens
  Cyclin H ribozyme binding site
acccgctatcccatattgg

SEQ ID NO: 2893 - DNA, 19 bp, Homo sapiens
  Cyclin H ribozyme binding site
ctatcccatattggagaat

SEQ ID NO: 2894 - DNA, 19 bp, Homo sapiens
  Cyclin H ribozyme binding site
atcccatattggagaatcc

SEQ ID NO: 2895 - DNA, 19 bp, Homo sapiens
  Cyclin H ribozyme binding site
ttggagaatccagagattt

SEQ ID NO: 2896 - DNA, 19 bp, Homo sapiens
  Cyclin H ribozyme binding site
tccagagattttgaggaaa

SEQ ID NO: 2897 - DNA, 19 bp, Homo sapiens
  Cyclin H ribozyme binding site
ccagagattttgaggaaaa

SEQ ID NO: 2898 - DNA, 19 bp, Homo sapiens
  Cyclin H ribozyme binding site
cagagattttgaggaaaac

SEQ ID NO: 2899 - DNA, 19 bp, Homo sapiens
  Cyclin H ribozyme binding site
ctgatgactttcttaatag

SEQ ID NO: 2900 - DNA, 19 bp, Homo sapiens
  Cyclin H ribozyme binding site
tgatgactttcttaataga

SEQ ID NO: 2901 - DNA, 19 bp, Homo sapiens
  Cyclin H ribozyme binding site
gatgactttcttaatagaa

SEQ ID NO: 2902 - DNA, 19 bp, Homo sapiens
  Cyclin H ribozyme binding site
tgactttcttaatagaatt

SEQ ID NO: 2903 - DNA, 19 bp, Homo sapiens
  Cyclin H ribozyme binding site
gactttcttaatagaattg

SEQ ID NO: 2904 - DNA, 19 bp, Homo sapiens
  Cyclin H ribozyme binding site
tttcttaatagaattgcat

SEQ ID NO: 2905 - DNA, 19 bp, Homo sapiens
  Cyclin H ribozyme binding site
taatagaattgcattgacg

SEQ ID NO: 2906 - DNA, 19 bp, Homo sapiens
  Cyclin H ribozyme binding site
gaattgcattgacggatgc

SEQ ID NO: 2907 - DNA, 19 bp, Homo sapiens
  Cyclin H ribozyme binding site
acggatgcttaccttttat

SEQ ID NO: 2908 - DNA, 19 bp, Homo sapiens
  Cyclin H ribozyme binding site
cggatgcttaccttttata

SEQ ID NO: 2909 - DNA, 19 bp, Homo sapiens
  Cyclin H ribozyme binding site
tgcttaccttttatacaca

SEQ ID NO: 2910 - DNA, 19 bp, Homo sapiens
  Cyclin H ribozyme binding site
gcttaccttttatacacac

SEQ ID NO: 2911 - DNA, 19 bp, Homo sapiens
  Cyclin H ribozyme binding site
cttaccttttatacacacc

SEQ ID NO: 2912 - DNA, 19 bp, Homo sapiens
  Cyclin H ribozyme binding site
ttaccttttatacacacct

SEQ ID NO: 2913 - DNA, 19 bp, Homo sapiens
  Cyclin H ribozyme binding site
accttttatacacaccttc

SEQ ID NO: 2914 - DNA, 19 bp, Homo sapiens
  Cyclin H ribozyme binding site
tacacaccttcccaaattg

SEQ ID NO: 2915 - DNA, 19 bp, Homo sapiens
  Cyclin H ribozyme binding site
acacaccttcccaaattgc

SEQ ID NO: 2916 - DNA, 19 bp, Homo sapiens
  Cyclin H ribozyme binding site
ttcccaaattgccctgact

SEQ ID NO: 2917 - DNA, 19 bp, Homo sapiens
  Cyclin H ribozyme binding site
gactgccattttatctagt

SEQ ID NO: 2918 - DNA, 19 bp, Homo sapiens
  Cyclin H ribozyme binding site
actgccattttatctagtg

SEQ ID NO: 2919 - DNA, 19 bp, Homo sapiens
  Cyclin H ribozyme binding site
ctgccattttatctagtgc

SEQ ID NO: 2920 - DNA, 19 bp, Homo sapiens
  Cyclin H ribozyme binding site
tgccattttatctagtgcc

SEQ ID NO: 2921 - DNA, 19 bp, Homo sapiens
  Cyclin H ribozyme binding site
ccattttatctagtgcctc

SEQ ID NO: 2922 - DNA, 19 bp, Homo sapiens
  Cyclin H ribozyme binding site
attttatctagtgcctcca

SEQ ID NO: 2923 - DNA, 19 bp, Homo sapiens
  Cyclin H ribozyme binding site
ctagtgcctccagggctgg

SEQ ID NO: 2924 - DNA, 19 bp, Homo sapiens
  Cyclin H ribozyme binding site
ggctggaattactatggaa

SEQ ID NO: 2925 - DNA, 19 bp, Homo sapiens
  Cyclin H ribozyme binding site
gctggaattactatggaaa

SEQ ID NO: 2926 - DNA, 19 bp, Homo sapiens
  Cyclin H ribozyme binding site
ggaattactatggaaagtt

SEQ ID NO: 2927 - DNA, 19 bp, Homo sapiens
  Cyclin H ribozyme binding site
atggaaagttatttatcag

SEQ ID NO: 2928 - DNA, 19 bp, Homo sapiens
  Cyclin H ribozyme binding site
tggaaagttatttatcaga

SEQ ID NO: 2929 - DNA, 19 bp, Homo sapiens
  Cyclin H ribozyme binding site
gaaagttatttatcagaga

SEQ ID NO: 2930 - DNA, 19 bp, Homo sapiens
  Cyclin H ribozyme binding site
aaagttatttatcagagag

SEQ ID NO: 2931 - DNA, 19 bp, Homo sapiens
  Cyclin H ribozyme binding site
aagttatttatcagagagt

SEQ ID NO: 2932 - DNA, 19 bp, Homo sapiens
  Cyclin H ribozyme binding site
gttatttatcagagagtct

SEQ ID NO: 2933 - DNA, 19 bp, Homo sapiens
  Cyclin H ribozyme binding site
tcagagagtctgatgctga

SEQ ID NO: 2934 - DNA, 19 bp, Homo sapiens
  Cyclin H ribozyme binding site
aacagaacttgcctgtcac

SEQ ID NO: 2935 - DNA, 19 bp, Homo sapiens
  Cyclin H ribozyme binding site
cttgcctgtcacagttact

SEQ ID NO: 2936 - DNA, 19 bp, Homo sapiens
  Cyclin H ribozyme binding site
tgtcacagttactagatat

SEQ ID NO: 2937 - DNA, 19 bp, Homo sapiens
  Cyclin H ribozyme binding site
gtcacagttactagatata

SEQ ID NO: 2938 - DNA, 19 bp, Homo sapiens
  Cyclin H ribozyme binding site
acagttactagatataatg

SEQ ID NO: 2939 - DNA, 19 bp, Homo sapiens
  Cyclin H ribozyme binding site
ttactagatataatgaaaa

SEQ ID NO: 2940 - DNA, 19 bp, Homo sapiens
  Cyclin H ribozyme binding site
actagatataatgaaaagc

SEQ ID NO: 2941 - DNA, 19 bp, Homo sapiens
  Cyclin H ribozyme binding site
tgagaaacttagtaaagaa

SEQ ID NO: 2942 - DNA, 19 bp, Homo sapiens
  Cyclin H ribozyme binding site
gagaaacttagtaaagaag

SEQ ID NO: 2943 - DNA, 19 bp, Homo sapiens
  Cyclin H ribozyme binding site
aaacttagtaaagaagtat

SEQ ID NO: 2944 - DNA, 19 bp, Homo sapiens
  Cyclin H ribozyme binding site
taaagaagtatgaaccacc

SEQ ID NO: 2945 - DNA, 19 bp, Homo sapiens
  Cyclin H ribozyme binding site
cacccagatctgaagaagt

SEQ ID NO: 2946 - DNA, 19 bp, Homo sapiens
  Cyclin H ribozyme binding site
tgaagaagttgctgttctg

SEQ ID NO: 2947 - DNA, 19 bp, Homo sapiens
  Cyclin H ribozyme binding site
agttgctgttctgaaacag

SEQ ID NO: 2948 - DNA, 19 bp, Homo sapiens
  Cyclin H ribozyme binding site
gttgctgttctgaaacaga

SEQ ID NO: 2949 - DNA, 19 bp, Homo sapiens
  Cyclin H ribozyme binding site
aacagaagttggagcgatg

SEQ ID NO: 2950 - DNA, 19 bp, Homo sapiens
  Cyclin H ribozyme binding site
gagcgatgtcattctgctg

SEQ ID NO: 2951 - DNA, 19 bp, Homo sapiens
  Cyclin H ribozyme binding site
cgatgtcattctgctgagc

SEQ ID NO: 2952 - DNA, 19 bp, Homo sapiens
  Cyclin H ribozyme binding site
gatgtcattctgctgagct

SEQ ID NO: 2953 - DNA, 19 bp, Homo sapiens
  Cyclin H ribozyme binding site
tgctgagcttgcacttaac

SEQ ID NO: 2954 - DNA, 19 bp, Homo sapiens
  Cyclin H ribozyme binding site
gcttgcacttaacgtaatc

SEQ ID NO: 2955 - DNA, 19 bp, Homo sapiens
  Cyclin H ribozyme binding site
cttgcacttaacgtaatca

SEQ ID NO: 2956 - DNA, 19 bp, Homo sapiens
  Cyclin H ribozyme binding site
acttaacgtaatcacgaag

SEQ ID NO: 2957 - DNA, 19 bp, Homo sapiens
  Cyclin H ribozyme binding site
taacgtaatcacgaagaag

SEQ ID NO: 2958 - DNA, 19 bp, Homo sapiens
  Cyclin H ribozyme binding site
ggaaaggctatgaagatga

SEQ ID NO: 2959 - DNA, 19 bp, Homo sapiens
  Cyclin H ribozyme binding site
gatgatgattacgtctcaa

SEQ ID NO: 2960 - DNA, 19 bp, Homo sapiens
  Cyclin H ribozyme binding site
atgatgattacgtctcaaa

SEQ ID NO: 2961 - DNA, 19 bp, Homo sapiens
  Cyclin H ribozyme binding site
tgattacgtctcaaagaaa

SEQ ID NO: 2962 - DNA, 19 bp, Homo sapiens
  Cyclin H ribozyme binding site
attacgtctcaaagaaatc

SEQ ID NO: 2963 - DNA, 19 bp, Homo sapiens
  Cyclin H ribozyme binding site
caaagaaatccaaacatga

SEQ ID NO: 2964 - DNA, 19 bp, Homo sapiens
  Cyclin H ribozyme binding site
cgacctggtagaatctctc

SEQ ID NO: 2965 - DNA, 19 bp, Homo sapiens
  Cyclin A1 ribozyme binding site
ggtgttgttccggacacat

SEQ ID NO: 2966 - DNA, 19 bp, Homo sapiens
  Cyclin A1 ribozyme binding site
cggacacatagaaagataa

SEQ ID NO: 2967 - DNA, 19 bp, Homo sapiens
  Cyclin A1 ribozyme binding site
tagaaagataacgacggga

SEQ ID NO: 2968 - DNA, 19 bp, Homo sapiens
  Cyclin A1 ribozyme binding site
gggccccgtttggggtcca

SEQ ID NO: 2969 - DNA, 19 bp, Homo sapiens
  Cyclin A1 ribozyme binding site
ggccccgtttggggtccag

SEQ ID NO: 2970 - DNA, 19 bp, Homo sapiens
  Cyclin A1 ribozyme binding site
gtttggggtccaggcaggt

SEQ ID NO: 2971 - DNA, 19 bp, Homo sapiens
  Cyclin A1 ribozyme binding site
caggcaggttttggggcct

SEQ ID NO: 2972 - DNA, 19 bp, Homo sapiens
  Cyclin A1 ribozyme binding site
aggcaggttttggggcctc

SEQ ID NO: 2973 - DNA, 19 bp, Homo sapiens
  Cyclin A1 ribozyme binding site
ggcaggttttggggcctcc

SEQ ID NO: 2974 - DNA, 19 bp, Homo sapiens
  Cyclin A1 ribozyme binding site
ttggggcctcctgtctggt

SEQ ID NO: 2975 - DNA, 19 bp, Homo sapiens
  Cyclin A1 ribozyme binding site
gcctcctgtctggtgggag

SEQ ID NO: 2976 - DNA, 19 bp, Homo sapiens
  Cyclin A1 ribozyme binding site
gaccctgctcgtcacttgg

SEQ ID NO: 2977 - DNA, 19 bp, Homo sapiens
  Cyclin A1 ribozyme binding site
cctgctcgtcacttgggat

SEQ ID NO: 2978 - DNA, 19 bp, Homo sapiens
  Cyclin A1 ribozyme binding site
ctcgtcacttgggatggag

SEQ ID NO: 2979 - DNA, 19 bp, Homo sapiens
  Cyclin A1 ribozyme binding site
agaccggctttcccgcaat

SEQ ID NO: 2980 - DNA, 19 bp, Homo sapiens
  Cyclin A1 ribozyme binding site
gaccggctttcccgcaatc

SEQ ID NO: 2981 - DNA, 19 bp, Homo sapiens
  Cyclin A1 ribozyme binding site
accggctttcccgcaatca

SEQ ID NO: 2982 - DNA, 19 bp, Homo sapiens
  Cyclin A1 ribozyme binding site
tcccgcaatcatgtaccct

SEQ ID NO: 2983 - DNA, 19 bp, Homo sapiens
  Cyclin A1 ribozyme binding site
caatcatgtaccctggatc

SEQ ID NO: 2984 - DNA, 19 bp, Homo sapiens
  Cyclin A1 ribozyme binding site
accctggatcttttattgg

SEQ ID NO: 2985 - DNA, 19 bp, Homo sapiens
  Cyclin A1 ribozyme binding site
cctggatcttttattgggg

SEQ ID NO: 2986 - DNA, 19 bp, Homo sapiens
  Cyclin A1 ribozyme binding site
ctggatcttttattggggg

SEQ ID NO: 2987 - DNA, 19 bp, Homo sapiens
  Cyclin A1 ribozyme binding site
tggatcttttattgggggc

SEQ ID NO: 2988 - DNA, 19 bp, Homo sapiens
  Cyclin A1 ribozyme binding site
ggatcttttattgggggct

SEQ ID NO: 2989 - DNA, 19 bp, Homo sapiens
  Cyclin A1 ribozyme binding site
atcttttattgggggctgg

SEQ ID NO: 2990 - DNA, 19 bp, Homo sapiens
  Cyclin A1 ribozyme binding site
gagaagagtatctcagctg

SEQ ID NO: 2991 - DNA, 19 bp, Homo sapiens
  Cyclin A1 ribozyme binding site
gaagagtatctcagctggg

SEQ ID NO: 2992 - DNA, 19 bp, Homo sapiens
  Cyclin A1 ribozyme binding site
agagtatctcagctgggaa

SEQ ID NO: 2993 - DNA, 19 bp, Homo sapiens
  Cyclin A1 ribozyme binding site
accggggctcccagatttc

SEQ ID NO: 2994 - DNA, 19 bp, Homo sapiens
  Cyclin A1 ribozyme binding site
ctcccagatttcgtcttcc

SEQ ID NO: 2995 - DNA, 19 bp, Homo sapiens
  Cyclin A1 ribozyme binding site
tcccagatttcgtcttcca

SEQ ID NO: 2996 - DNA, 19 bp, Homo sapiens
  Cyclin A1 ribozyme binding site
cccagatttcgtcttccag

SEQ ID NO: 2997 - DNA, 19 bp, Homo sapiens
  Cyclin A1 ribozyme binding site
agatttcgtcttccagcag

SEQ ID NO: 2998 - DNA, 19 bp, Homo sapiens
  Cyclin A1 ribozyme binding site
atttcgtcttccagcagca

SEQ ID NO: 2999 - DNA, 19 bp, Homo sapiens
  Cyclin A1 ribozyme binding site
tttcgtcttccagcagcag

SEQ ID NO: 3000 - DNA, 19 bp, Homo sapiens
  Cyclin A1 ribozyme binding site
ccgtggagtctgaagcaat

SEQ ID NO: 3001 - DNA, 19 bp, Homo sapiens
  Cyclin A1 ribozyme binding site
gagtggagttgtgctggct

SEQ ID NO: 3002 - DNA, 19 bp, Homo sapiens
  Cyclin A1 ribozyme binding site
gtgctggctacagtggccc

SEQ ID NO: 3003 - DNA, 19 bp, Homo sapiens
  Cyclin A1 ribozyme binding site
gcccgaggtcccgatgctt

SEQ ID NO: 3004 - DNA, 19 bp, Homo sapiens
  Cyclin A1 ribozyme binding site
cccgatgcttgtcagatac

SEQ ID NO: 3005 - DNA, 19 bp, Homo sapiens
  Cyclin A1 ribozyme binding site
gatgcttgtcagatactca

SEQ ID NO: 3006 - DNA, 19 bp, Homo sapiens
  Cyclin A1 ribozyme binding site
ttgtcagatactcaccaga

SEQ ID NO: 3007 - DNA, 19 bp, Homo sapiens
  Cyclin A1 ribozyme binding site
tcagatactcaccagagcc

SEQ ID NO: 3008 - DNA, 19 bp, Homo sapiens
  Cyclin A1 ribozyme binding site
ggccaggatcccccgcaga

SEQ ID NO: 3009 - DNA, 19 bp, Homo sapiens
  Cyclin A1 ribozyme binding site
gacagtgctagggctgcta

SEQ ID NO: 3010 - DNA, 19 bp, Homo sapiens
  Cyclin A1 ribozyme binding site
agggctgctaactgcaaat

SEQ ID NO: 3011 - DNA, 19 bp, Homo sapiens
  Cyclin A1 ribozyme binding site
atgggcagtacaggaggac

SEQ ID NO: 3012 - DNA, 19 bp, Homo sapiens
  Cyclin A1 ribozyme binding site
ccaggggatcacaagaatc

SEQ ID NO: 3013 - DNA, 19 bp, Homo sapiens
  Cyclin A1 ribozyme binding site
cacaagaatcaggtgttat

SEQ ID NO: 3014 - DNA, 19 bp, Homo sapiens
  Cyclin A1 ribozyme binding site
atcaggtgttattctggat

SEQ ID NO: 3015 - DNA, 19 bp, Homo sapiens
  Cyclin A1 ribozyme binding site
tcaggtgttattctggatc

SEQ ID NO: 3016 - DNA, 19 bp, Homo sapiens
  Cyclin A1 ribozyme binding site
aggtgttattctggatcag

SEQ ID NO: 3017 - DNA, 19 bp, Homo sapiens
  Cyclin A1 ribozyme binding site
ggtgttattctggatcaga

SEQ ID NO: 3018 - DNA, 19 bp, Homo sapiens
  Cyclin A1 ribozyme binding site
attctggatcagaaaatgc

SEQ ID NO: 3019 - DNA, 19 bp, Homo sapiens
  Cyclin A1 ribozyme binding site
aaaatgccttccctccagc

SEQ ID NO: 3020 - DNA, 19 bp, Homo sapiens
  Cyclin A1 ribozyme binding site
aaatgccttccctccagct

SEQ ID NO: 3021 - DNA, 19 bp, Homo sapiens
  Cyclin A1 ribozyme binding site
gccttccctccagctggaa

SEQ ID NO: 3022 - DNA, 19 bp, Homo sapiens
  Cyclin A1 ribozyme binding site
gaaagcactccctgactgt

SEQ ID NO: 3023 - DNA, 19 bp, Homo sapiens
  Cyclin A1 ribozyme binding site
ctgtggggtccaagagccc

SEQ ID NO: 3024 - DNA, 19 bp, Homo sapiens
  Cyclin A1 ribozyme binding site
agcaagggtttgacatcta

SEQ ID NO: 3025 - DNA, 19 bp, Homo sapiens
  Cyclin A1 ribozyme binding site
gcaagggtttgacatctac

SEQ ID NO: 3026 - DNA, 19 bp, Homo sapiens
  Cyclin A1 ribozyme binding site
gtttgacatctacatggat

SEQ ID NO: 3027 - DNA, 19 bp, Homo sapiens
  Cyclin A1 ribozyme binding site
ttgacatctacatggatga

SEQ ID NO: 3028 - DNA, 19 bp, Homo sapiens
  Cyclin A1 ribozyme binding site
ggatgaactagagcagggg

SEQ ID NO: 3029 - DNA, 19 bp, Homo sapiens
  Cyclin A1 ribozyme binding site
acagctgctcggtcagaga

SEQ ID NO: 3030 - DNA, 19 bp, Homo sapiens
  Cyclin A1 ribozyme binding site
ctgctcggtcagagagggg

SEQ ID NO: 3031 - DNA, 19 bp, Homo sapiens
  Cyclin A1 ribozyme binding site
ggatggcatttgaggatgt

SEQ ID NO: 3032 - DNA, 19 bp, Homo sapiens
  Cyclin A1 ribozyme binding site
gatggcatttgaggatgtg

SEQ ID NO: 3033 - DNA, 19 bp, Homo sapiens
  Cyclin A1 ribozyme binding site
aggatgtgtatgaagtaga

SEQ ID NO: 3034 - DNA, 19 bp, Homo sapiens
  Cyclin A1 ribozyme binding site
gtatgaagtagacaccggc

SEQ ID NO: 3035 - DNA, 19 bp, Homo sapiens
  Cyclin A1 ribozyme binding site
cggcacactcaagtcagac

SEQ ID NO: 3036 - DNA, 19 bp, Homo sapiens
  Cyclin A1 ribozyme binding site
cactcaagtcagacctgca

SEQ ID NO: 3037 - DNA, 19 bp, Homo sapiens
  Cyclin A1 ribozyme binding site
acctgcacttcctgctgga

SEQ ID NO: 3038 - DNA, 19 bp, Homo sapiens
  Cyclin A1 ribozyme binding site
cctgcacttcctgctggat

SEQ ID NO: 3039 - DNA, 19 bp, Homo sapiens
  Cyclin A1 ribozyme binding site
ctgctggatttcaacacag

SEQ ID NO: 3040 - DNA, 19 bp, Homo sapiens
  Cyclin A1 ribozyme binding site
tgctggatttcaacacagt

SEQ ID NO: 3041 - DNA, 19 bp, Homo sapiens
  Cyclin A1 ribozyme binding site
gctggatttcaacacagtt

SEQ ID NO: 3042 - DNA, 19 bp, Homo sapiens
  Cyclin A1 ribozyme binding site
caacacagtttcccctatg

SEQ ID NO: 3043 - DNA, 19 bp, Homo sapiens
  Cyclin A1 ribozyme binding site
aacacagtttcccctatgc

SEQ ID NO: 3044 - DNA, 19 bp, Homo sapiens
  Cyclin A1 ribozyme binding site
acacagtttcccctatgct

SEQ ID NO: 3045 - DNA, 19 bp, Homo sapiens
  Cyclin A1 ribozyme binding site
gtttcccctatgctggtag

SEQ ID NO: 3046 - DNA, 19 bp, Homo sapiens
  Cyclin A1 ribozyme binding site
tatgctggtagattcatct

SEQ ID NO: 3047 - DNA, 19 bp, Homo sapiens
  Cyclin A1 ribozyme binding site
ctggtagattcatctctcc

SEQ ID NO: 3048 - DNA, 19 bp, Homo sapiens
  Cyclin A1 ribozyme binding site
tggtagattcatctctcct

SEQ ID NO: 3049 - DNA, 19 bp, Homo sapiens
  Cyclin A1 ribozyme binding site
tagattcatctctcctctc

SEQ ID NO: 3050 - DNA, 19 bp, Homo sapiens
  Cyclin A1 ribozyme binding site
gattcatctctcctctccc

SEQ ID NO: 3051 - DNA, 19 bp, Homo sapiens
  Cyclin A1 ribozyme binding site
ttcatctctcctctcccag

SEQ ID NO: 3052 - DNA, 19 bp, Homo sapiens
  Cyclin A1 ribozyme binding site
atctctcctctcccagtct

SEQ ID NO: 3053 - DNA, 19 bp, Homo sapiens
  Cyclin A1 ribozyme binding site
ctctcctctcccagtctga

SEQ ID NO: 3054 - DNA, 19 bp, Homo sapiens
  Cyclin A1 ribozyme binding site
tctcccagtctgaagatat

SEQ ID NO: 3055 - DNA, 19 bp, Homo sapiens
  Cyclin A1 ribozyme binding site
tctgaagatatatccagtc

SEQ ID NO: 3056 - DNA, 19 bp, Homo sapiens
  Cyclin A1 ribozyme binding site
tgaagatatatccagtctt

SEQ ID NO: 3057 - DNA, 19 bp, Homo sapiens
  Cyclin A1 ribozyme binding site
aagatatatccagtcttgg

SEQ ID NO: 3058 - DNA, 19 bp, Homo sapiens
  Cyclin A1 ribozyme binding site
atatccagtcttggcacag

SEQ ID NO: 3059 - DNA, 19 bp, Homo sapiens
  Cyclin A1 ribozyme binding site
atccagtcttggcacagat

SEQ ID NO: 3060 - DNA, 19 bp, Homo sapiens
  Cyclin A1 ribozyme binding site
agatgtgataaatgtgact

SEQ ID NO: 3061 - DNA, 19 bp, Homo sapiens
  Cyclin A1 ribozyme binding site
tgactgaatatgctgaaga

SEQ ID NO: 3062 - DNA, 19 bp, Homo sapiens
  Cyclin A1 ribozyme binding site
tgaagaaatttatcagtac

SEQ ID NO: 3063 - DNA, 19 bp, Homo sapiens
  Cyclin A1 ribozyme binding site
gaagaaatttatcagtacc

SEQ ID NO: 3064 - DNA, 19 bp, Homo sapiens
  Cyclin A1 ribozyme binding site
aagaaatttatcagtacct

SEQ ID NO: 3065 - DNA, 19 bp, Homo sapiens
  Cyclin A1 ribozyme binding site
gaaatttatcagtacctta

SEQ ID NO: 3066 - DNA, 19 bp, Homo sapiens
  Cyclin A1 ribozyme binding site
tttatcagtaccttaggga

SEQ ID NO: 3067 - DNA, 19 bp, Homo sapiens
  Cyclin A1 ribozyme binding site
tcagtaccttagggaagct

SEQ ID NO: 3068 - DNA, 19 bp, Homo sapiens
  Cyclin A1 ribozyme binding site
cagtaccttagggaagctg

SEQ ID NO: 3069 - DNA, 19 bp, Homo sapiens
  Cyclin A1 ribozyme binding site
agctgaaataaggcacaga

SEQ ID NO: 3070 - DNA, 19 bp, Homo sapiens
  Cyclin A1 ribozyme binding site
aagcacactacatgaagaa

SEQ ID NO: 3071 - DNA, 19 bp, Homo sapiens
  Cyclin A1 ribozyme binding site
gccagacatcacggaaggc

SEQ ID NO: 3072 - DNA, 19 bp, Homo sapiens
  Cyclin A1 ribozyme binding site
gcgcacgattctggtggac

SEQ ID NO: 3073 - DNA, 19 bp, Homo sapiens
  Cyclin A1 ribozyme binding site
cgcacgattctggtggact

SEQ ID NO: 3074 - DNA, 19 bp, Homo sapiens
  Cyclin A1 ribozyme binding site
ggtggaggttggggaagaa

SEQ ID NO: 3075 - DNA, 19 bp, Homo sapiens
  Cyclin A1 ribozyme binding site
gggaagaatataaacttcg

SEQ ID NO: 3076 - DNA, 19 bp, Homo sapiens
  Cyclin A1 ribozyme binding site
gaagaatataaacttcgag

SEQ ID NO: 3077 - DNA, 19 bp, Homo sapiens
  Cyclin A1 ribozyme binding site
atataaacttcgagcagag

SEQ ID NO: 3078 - DNA, 19 bp, Homo sapiens
  Cyclin A1 ribozyme binding site
tataaacttcgagcagaga

SEQ ID NO: 3079 - DNA, 19 bp, Homo sapiens
  Cyclin A1 ribozyme binding site
agaccctgtatctggctgt

SEQ ID NO: 3080 - DNA, 19 bp, Homo sapiens
  Cyclin A1 ribozyme binding site
accctgtatctggctgtca

SEQ ID NO: 3081 - DNA, 19 bp, Homo sapiens
  Cyclin A1 ribozyme binding site
tctggctgtcaacttcctg

SEQ ID NO: 3082 - DNA, 19 bp, Homo sapiens
  Cyclin A1 ribozyme binding site
ctgtcaacttcctggacag

SEQ ID NO: 3083 - DNA, 19 bp, Homo sapiens
  Cyclin A1 ribozyme binding site
tgtcaacttcctggacagg

SEQ ID NO: 3084 - DNA, 19 bp, Homo sapiens
  Cyclin A1 ribozyme binding site
tggacaggttcctttcatg

SEQ ID NO: 3085 - DNA, 19 bp, Homo sapiens
  Cyclin A1 ribozyme binding site
ggacaggttcctttcatgt

SEQ ID NO: 3086 - DNA, 19 bp, Homo sapiens
  Cyclin A1 ribozyme binding site
caggttcctttcatgtatg

SEQ ID NO: 3087 - DNA, 19 bp, Homo sapiens
  Cyclin A1 ribozyme binding site
aggttcctttcatgtatgt

SEQ ID NO: 3088 - DNA, 19 bp, Homo sapiens
  Cyclin A1 ribozyme binding site
ggttcctttcatgtatgtc

SEQ ID NO: 3089 - DNA, 19 bp, Homo sapiens
  Cyclin A1 ribozyme binding site
ctttcatgtatgtctgttc

SEQ ID NO: 3090 - DNA, 19 bp, Homo sapiens
  Cyclin A1 ribozyme binding site
catgtatgtctgttctgag

SEQ ID NO: 3091 - DNA, 19 bp, Homo sapiens
  Cyclin A1 ribozyme binding site
tatgtctgttctgagaggg

SEQ ID NO: 3092 - DNA, 19 bp, Homo sapiens
  Cyclin A1 ribozyme binding site
atgtctgttctgagaggga

SEQ ID NO: 3093 - DNA, 19 bp, Homo sapiens
  Cyclin A1 ribozyme binding site
actgcagctcgtaggaaca

SEQ ID NO: 3094 - DNA, 19 bp, Homo sapiens
  Cyclin A1 ribozyme binding site
gcagctcgtaggaacagca

SEQ ID NO: 3095 - DNA, 19 bp, Homo sapiens
  Cyclin A1 ribozyme binding site
acagcagctatgcttttgg

SEQ ID NO: 3096 - DNA, 19 bp, Homo sapiens
  Cyclin A1 ribozyme binding site
agctatgcttttggcttcg

SEQ ID NO: 3097 - DNA, 19 bp, Homo sapiens
  Cyclin A1 ribozyme binding site
gctatgcttttggcttcga

SEQ ID NO: 3098 - DNA, 19 bp, Homo sapiens
  Cyclin A1 ribozyme binding site
ctatgcttttggcttcgaa

SEQ ID NO: 3099 - DNA, 19 bp, Homo sapiens
  Cyclin A1 ribozyme binding site
cttttggcttcgaaatatg

SEQ ID NO: 3100 - DNA, 19 bp, Homo sapiens
  Cyclin A1 ribozyme binding site
ttttggcttcgaaatatga

SEQ ID NO: 3101 - DNA, 19 bp, Homo sapiens
  Cyclin A1 ribozyme binding site
cttcgaaatatgaagagat

SEQ ID NO: 3102 - DNA, 19 bp, Homo sapiens
  Cyclin A1 ribozyme binding site
tgaagagatatatcctcct

SEQ ID NO: 3103 - DNA, 19 bp, Homo sapiens
  Cyclin A1 ribozyme binding site
aagagatatatcctcctga

SEQ ID NO: 3104 - DNA, 19 bp, Homo sapiens
  Cyclin A1 ribozyme binding site
gagatatatcctcctgaag

SEQ ID NO: 3105 - DNA, 19 bp, Homo sapiens
  Cyclin A1 ribozyme binding site
atatatcctcctgaagtag

SEQ ID NO: 3106 - DNA, 19 bp, Homo sapiens
  Cyclin A1 ribozyme binding site
tcctgaagtagacgagttt

SEQ ID NO: 3107 - DNA, 19 bp, Homo sapiens
  Cyclin A1 ribozyme binding site
tagacgagtttgtctatat

SEQ ID NO: 3108 - DNA, 19 bp, Homo sapiens
  Cyclin A1 ribozyme binding site
agacgagtttgtctatatc

SEQ ID NO: 3109 - DNA, 19 bp, Homo sapiens
  Cyclin A1 ribozyme binding site
cgagtttgtctatatcacc

SEQ ID NO: 3110 - DNA, 19 bp, Homo sapiens
  Cyclin A1 ribozyme binding site
agtttgtctatatcaccga

SEQ ID NO: 3111 - DNA, 19 bp, Homo sapiens
  Cyclin A1 ribozyme binding site
tttgtctatatcaccgatg

SEQ ID NO: 3112 - DNA, 19 bp, Homo sapiens
  Cyclin A1 ribozyme binding site
tgtctatatcaccgatgat

SEQ ID NO: 3113 - DNA, 19 bp, Homo sapiens
  Cyclin A1 ribozyme binding site
accgatgatacatacacaa

SEQ ID NO: 3114 - DNA, 19 bp, Homo sapiens
  Cyclin A1 ribozyme binding site
atgatacatacacaaaacg

SEQ ID NO: 3115 - DNA, 19 bp, Homo sapiens
  Cyclin A1 ribozyme binding site
gacaactgttaaaaatgga

SEQ ID NO: 3116 - DNA, 19 bp, Homo sapiens
  Cyclin A1 ribozyme binding site
acaactgttaaaaatggaa

SEQ ID NO: 3117 - DNA, 19 bp, Homo sapiens
  Cyclin A1 ribozyme binding site
tggaacacttgcttctgaa

SEQ ID NO: 3118 - DNA, 19 bp, Homo sapiens
  Cyclin A1 ribozyme binding site
acacttgcttctgaaagtt

SEQ ID NO: 3119 - DNA, 19 bp, Homo sapiens
  Cyclin A1 ribozyme binding site
cacttgcttctgaaagttc

SEQ ID NO: 3120 - DNA, 19 bp, Homo sapiens
  Cyclin A1 ribozyme binding site
tctgaaagttctagctttt

SEQ ID NO: 3121 - DNA, 19 bp, Homo sapiens
  Cyclin A1 ribozyme binding site
ctgaaagttctagcttttg

SEQ ID NO: 3122 - DNA, 19 bp, Homo sapiens
  Cyclin A1 ribozyme binding site
gaaagttctagcttttgat

SEQ ID NO: 3123 - DNA, 19 bp, Homo sapiens
  Cyclin A1 ribozyme binding site
gttctagcttttgatctga

SEQ ID NO: 3124 - DNA, 19 bp, Homo sapiens
  Cyclin A1 ribozyme binding site
ttctagcttttgatctgac

SEQ ID NO: 3125 - DNA, 19 bp, Homo sapiens
  Cyclin A1 ribozyme binding site
tctagcttttgatctgaca

SEQ ID NO: 3126 - DNA, 19 bp, Homo sapiens
  Cyclin A1 ribozyme binding site
gcttttgatctgacagtac

SEQ ID NO: 3127 - DNA, 19 bp, Homo sapiens
  Cyclin A1 ribozyme binding site
tctgacagtaccaaccacc

SEQ ID NO: 3128 - DNA, 19 bp, Homo sapiens
  Cyclin A1 ribozyme binding site
ccaaccagtttctccttca

SEQ ID NO: 3129 - DNA, 19 bp, Homo sapiens
  Cyclin A1 ribozyme binding site
caaccagtttctccttcag

SEQ ID NO: 3130 - DNA, 19 bp, Homo sapiens
  Cyclin A1 ribozyme binding site
aaccagtttctccttcagt

SEQ ID NO: 3131 - DNA, 19 bp, Homo sapiens
  Cyclin A1 ribozyme binding site
ccagtttctccttcagtac

SEQ ID NO: 3132 - DNA, 19 bp, Homo sapiens
  Cyclin A1 ribozyme binding site
gtttctccttcagtacttg

SEQ ID NO: 3133 - DNA, 19 bp, Homo sapiens
  Cyclin A1 ribozyme binding site
tttctccttcagtacttga

SEQ ID NO: 3134 - DNA, 19 bp, Homo sapiens
  Cyclin A1 ribozyme binding site
tccttcagtacttgaggcg

SEQ ID NO: 3135 - DNA, 19 bp, Homo sapiens
  Cyclin A1 ribozyme binding site
ttcagtacttgaggcgaca

SEQ ID NO: 3136 - DNA, 19 bp, Homo sapiens
  Cyclin A1 ribozyme binding site
agtgtgcgtcaggactgag

SEQ ID NO: 3137 - DNA, 19 bp, Homo sapiens
  Cyclin A1 ribozyme binding site
aacctggctaagtacgtag

SEQ ID NO: 3138 - DNA, 19 bp, Homo sapiens
  Cyclin A1 ribozyme binding site
tggctaagtacgtagcsga

SEQ ID NO: 3139 - DNA, 19 bp, Homo sapiens
  Cyclin A1 ribozyme binding site
taagtacgtagcsgagctg

SEQ ID NO: 3140 - DNA, 19 bp, Homo sapiens
  Cyclin A1 ribozyme binding site
gagctgagtctacttgaag

SEQ ID NO: 3141 - DNA, 19 bp, Homo sapiens
  Cyclin A1 ribozyme binding site
gctgagtctacttgaagca

SEQ ID NO: 3142 - DNA, 19 bp, Homo sapiens
  Cyclin A1 ribozyme binding site
gagtctacttgaagcagat

SEQ ID NO: 3143 - DNA, 19 bp, Homo sapiens
  Cyclin A1 ribozyme binding site
gaagcagatccattcttga

SEQ ID NO: 3144 - DNA, 19 bp, Homo sapiens
  Cyclin A1 ribozyme binding site
cagatccattcttgaaata

SEQ ID NO: 3145 - DNA, 19 bp, Homo sapiens
  Cyclin A1 ribozyme binding site
agatccattcttgaaatat

SEQ ID NO: 3146 - DNA, 19 bp, Homo sapiens
  Cyclin A1 ribozyme binding site
atccattcttgaaatatct

SEQ ID NO: 3147 - DNA, 19 bp, Homo sapiens
  Cyclin A1 ribozyme binding site
tcttgaaatatcttccttc

SEQ ID NO: 3148 - DNA, 19 bp, Homo sapiens
  Cyclin A1 ribozyme binding site
ttgaaatatcttccttcac

SEQ ID NO: 3149 - DNA, 19 bp, Homo sapiens
  Cyclin A1 ribozyme binding site
gaaatatcttccttcactg

SEQ ID NO: 3150 - DNA, 19 bp, Homo sapiens
  Cyclin A1 ribozyme binding site
aaatatcttccttcactga

SEQ ID NO: 3151 - DNA, 19 bp, Homo sapiens
  Cyclin A1 ribozyme binding site
tatcttccttcactgatag

SEQ ID NO: 3152 - DNA, 19 bp, Homo sapiens
  Cyclin A1 ribozyme binding site
atcttccttcactgatagc

SEQ ID NO: 3153 - DNA, 19 bp, Homo sapiens
  Cyclin A1 ribozyme binding site
ttcactgatagctgcagca

SEQ ID NO: 3154 - DNA, 19 bp, Homo sapiens
  Cyclin A1 ribozyme binding site
gcagcagctttttgcctgg

SEQ ID NO: 3155 - DNA, 19 bp, Homo sapiens
  Cyclin A1 ribozyme binding site
cagcagctttttgcctggc

SEQ ID NO: 3156 - DNA, 19 bp, Homo sapiens
  Cyclin A1 ribozyme binding site
agcagctttttgcctggca

SEQ ID NO: 3157 - DNA, 19 bp, Homo sapiens
  Cyclin A1 ribozyme binding site
gcagctttttgcctggcaa

SEQ ID NO: 3158 - DNA, 19 bp, Homo sapiens
  Cyclin A1 ribozyme binding site
tggcaaactatactgtgaa

SEQ ID NO: 3159 - DNA, 19 bp, Homo sapiens
  Cyclin A1 ribozyme binding site
gcaaactatactgtgaaca

SEQ ID NO: 3160 - DNA, 19 bp, Homo sapiens
  Cyclin A1 ribozyme binding site
acaagcacttttggccaga

SEQ ID NO: 3161 - DNA, 19 bp, Homo sapiens
  Cyclin A1 ribozyme binding site
caagcacttttggccagaa

SEQ ID NO: 3162 - DNA, 19 bp, Homo sapiens
  Cyclin A1 ribozyme binding site
aagcacttttggccagaaa

SEQ ID NO: 3163 - DNA, 19 bp, Homo sapiens
  Cyclin A1 ribozyme binding site
agaaacccttgctgcattt

SEQ ID NO: 3164 - DNA, 19 bp, Homo sapiens
  Cyclin A1 ribozyme binding site
ttgctgcatttacagggta

SEQ ID NO: 3165 - DNA, 19 bp, Homo sapiens
  Cyclin A1 ribozyme binding site
tgctgcatttacagggtat

SEQ ID NO: 3166 - DNA, 19 bp, Homo sapiens
  Cyclin A1 ribozyme binding site
gctgcatttacagggtatt

SEQ ID NO: 3167 - DNA, 19 bp, Homo sapiens
  Cyclin A1 ribozyme binding site
ttacagggtattcattaag

SEQ ID NO: 3168 - DNA, 19 bp, Homo sapiens
  Cyclin A1 ribozyme binding site
acagggtattcattaagtg

SEQ ID NO: 3169 - DNA, 19 bp, Homo sapiens
  Cyclin A1 ribozyme binding site
cagggtattcattaagtga

SEQ ID NO: 3170 - DNA, 19 bp, Homo sapiens
  Cyclin A1 ribozyme binding site
ggtattcattaagtgaaat

SEQ ID NO: 3171 - DNA, 19 bp, Homo sapiens
  Cyclin A1 ribozyme binding site
gtattcattaagtgaaatt

SEQ ID NO: 3172 - DNA, 19 bp, Homo sapiens
  Cyclin A1 ribozyme binding site
aagtgaaattgtgccttgc

SEQ ID NO: 3173 - DNA, 19 bp, Homo sapiens
  Cyclin A1 ribozyme binding site
attgtgccttgcctgagtg

SEQ ID NO: 3174 - DNA, 19 bp, Homo sapiens
  Cyclin A1 ribozyme binding site
gagtgagcttcataaagcg

SEQ ID NO: 3175 - DNA, 19 bp, Homo sapiens
  Cyclin A1 ribozyme binding site
agtgagcttcataaagcgt

SEQ ID NO: 3176 - DNA, 19 bp, Homo sapiens
  Cyclin A1 ribozyme binding site
gagcttcataaagcgtact

SEQ ID NO: 3177 - DNA, 19 bp, Homo sapiens
  Cyclin A1 ribozyme binding site
ataaagcgtaccttgatat

SEQ ID NO: 3178 - DNA, 19 bp, Homo sapiens
  Cyclin A1 ribozyme binding site
agcgtaccttgatataccc

SEQ ID NO: 3179 - DNA, 19 bp, Homo sapiens
  Cyclin A1 ribozyme binding site
taccttgatataccccatc

SEQ ID NO: 3180 - DNA, 19 bp, Homo sapiens
  Cyclin A1 ribozyme binding site
ccttgatataccccatcga

SEQ ID NO: 3181 - DNA, 19 bp, Homo sapiens
  Cyclin A1 ribozyme binding site
ataccccatcgacctcagc

SEQ ID NO: 3182 - DNA, 19 bp, Homo sapiens
  Cyclin A1 ribozyme binding site
catcgacctcagcaagcaa

SEQ ID NO: 3183 - DNA, 19 bp, Homo sapiens
  Cyclin A1 ribozyme binding site
gcaagcaattagggagaag

SEQ ID NO: 3184 - DNA, 19 bp, Homo sapiens
  Cyclin A1 ribozyme binding site
caagcaattagggagaagt

SEQ ID NO: 3185 - DNA, 19 bp, Homo sapiens
  Cyclin A1 ribozyme binding site
gggagaagtacaaggcttc

SEQ ID NO: 3186 - DNA, 19 bp, Homo sapiens
  Cyclin A1 ribozyme binding site
tacaaggcttcaaagtacc

SEQ ID NO: 3187 - DNA, 19 bp, Homo sapiens
  Cyclin A1 ribozyme binding site
acaaggcttcaaagtacct

SEQ ID NO: 3188 - DNA, 19 bp, Homo sapiens
  Cyclin A1 ribozyme binding site
cttcaaagtacctgtgtgt

SEQ ID NO: 3189 - DNA, 19 bp, Homo sapiens
  Cyclin A1 ribozyme binding site
tgtgtgtgtccctcatgga

SEQ ID NO: 3190 - DNA, 19 bp, Homo sapiens
  Cyclin A1 ribozyme binding site
tgtgtccctcatggagcca

SEQ ID NO: 3191 - DNA, 19 bp, Homo sapiens
  Cyclin A1 ribozyme binding site
acctgcagttcttcttcta

SEQ ID NO: 3192 - DNA, 19 bp, Homo sapiens
  Cyclin A1 ribozyme binding site
cctgcagttcttcttctac

SEQ ID NO: 3193 - DNA, 19 bp, Homo sapiens
  Cyclin A1 ribozyme binding site
tgcagttcttcttctacaa

SEQ ID NO: 3194 - DNA, 19 bp, Homo sapiens
  Cyclin A1 ribozyme binding site
gcagttcttcttctacaat

SEQ ID NO: 3195 - DNA, 19 bp, Homo sapiens
  Cyclin A1 ribozyme binding site
agttcttcttctacaataa

SEQ ID NO: 3196 - DNA, 19 bp, Homo sapiens
  Cyclin A1 ribozyme binding site
gttcttcttctacaataag

SEQ ID NO: 3197 - DNA, 19 bp, Homo sapiens
  Cyclin A1 ribozyme binding site
tcttcttctacaataagtt

SEQ ID NO: 3198 - DNA, 19 bp, Homo sapiens
  Cyclin A1 ribozyme binding site
ttctacaataagtttctga

SEQ ID NO: 3199 - DNA, 19 bp, Homo sapiens
  Cyclin A1 ribozyme binding site
acaataagtttctgaatgg

SEQ ID NO: 3200 - DNA, 19 bp, Homo sapiens
  Cyclin A1 ribozyme binding site
caataagtttctgaatgga

SEQ ID NO: 3201 - DNA, 19 bp, Homo sapiens
  Cyclin A1 ribozyme binding site
aataagtttctgaatggaa

SEQ ID NO: 3202 - DNA, 19 bp, Homo sapiens
  Cyclin A1 ribozyme binding site
ggaagcacttccagaactt

SEQ ID NO: 3203 - DNA, 19 bp, Homo sapiens
  Cyclin A1 ribozyme binding site
gaagcacttccagaacttc

SEQ ID NO: 3204 - DNA, 19 bp, Homo sapiens
  Cyclin A1 ribozyme binding site
tccagaacttcacctccat

SEQ ID NO: 3205 - DNA, 19 bp, Homo sapiens
  Cyclin A1 ribozyme binding site
ccagaacttcacctccata

SEQ ID NO: 3206 - DNA, 19 bp, Homo sapiens
  Cyclin A1 ribozyme binding site
acttcacctccatatcaga

SEQ ID NO: 3207 - DNA, 19 bp, Homo sapiens
  Cyclin A1 ribozyme binding site
cacctccatatcagaagtg

SEQ ID NO: 3208 - DNA, 19 bp, Homo sapiens
  Cyclin A1 ribozyme binding site
cctccatatcagaagtgcc

SEQ ID NO: 3209 - DNA, 19 bp, Homo sapiens
  Cyclin A1 ribozyme binding site
agtgccaataatcgtcata

SEQ ID NO: 3210 - DNA, 19 bp, Homo sapiens
  Cyclin A1 ribozyme binding site
gccaataatcgtcataggc

SEQ ID NO: 3211 - DNA, 19 bp, Homo sapiens
  Cyclin A1 ribozyme binding site
aataatcgtcataggcttc

SEQ ID NO: 3212 - DNA, 19 bp, Homo sapiens
  Cyclin A1 ribozyme binding site
aatcgtcataggcttctgc

SEQ ID NO: 3213 - DNA, 19 bp, Homo sapiens
  Cyclin A1 ribozyme binding site
tcataggcttctgcacgtt

SEQ ID NO: 3214 - DNA, 19 bp, Homo sapiens
  Cyclin A1 ribozyme binding site
cataggcttctgcacgttg

SEQ ID NO: 3215 - DNA, 19 bp, Homo sapiens
  Cyclin A1 ribozyme binding site
tctgcacgttggatcaact

SEQ ID NO: 3216 - DNA, 19 bp, Homo sapiens
  Cyclin A1 ribozyme binding site
acgttggatcaactaatgt

SEQ ID NO: 3217 - DNA, 19 bp, Homo sapiens
  Cyclin A1 ribozyme binding site
ggatcaactaatgttgttt

SEQ ID NO: 3218 - DNA, 19 bp, Homo sapiens
  Cyclin A1 ribozyme binding site
aactaatgttgtttacaat

SEQ ID NO: 3219 - DNA, 19 bp, Homo sapiens
  Cyclin A1 ribozyme binding site
taatgttgtttacaatata

SEQ ID NO: 3220 - DNA, 19 bp, Homo sapiens
  Cyclin A1 ribozyme binding site
aatgttgtttacaatatag

SEQ ID NO: 3221 - DNA, 19 bp, Homo sapiens
  Cyclin A1 ribozyme binding site
atgttgtttacaatataga

SEQ ID NO: 3222 - DNA, 19 bp, Homo sapiens
  Cyclin A1 ribozyme binding site
gtttacaatatagatgaca

SEQ ID NO: 3223 - DNA, 19 bp, Homo sapiens
  Cyclin A1 ribozyme binding site
ttacaatatagatgacatt

SEQ ID NO: 3224 - DNA, 19 bp, Homo sapiens
  Cyclin A1 ribozyme binding site
agatgacattttaaaaatg

SEQ ID NO: 3225 - DNA, 19 bp, Homo sapiens
  Cyclin A1 ribozyme binding site
gatgacattttaaaaatgt

SEQ ID NO: 3226 - DNA, 19 bp, Homo sapiens
  Cyclin A1 ribozyme binding site
atgacattttaaaaatgta

SEQ ID NO: 3227 - DNA, 19 bp, Homo sapiens
  Cyclin A1 ribozyme binding site
tgacattttaaaaatgtaa

SEQ ID NO: 3228 - DNA, 19 bp, Homo sapiens
  Cyclin A1 ribozyme binding site
taaaaatgtaaatgaattt

SEQ ID NO: 3229 - DNA, 19 bp, Homo sapiens
  Cyclin A1 ribozyme binding site
taaatgaatttagtttccc

SEQ ID NO: 3230 - DNA, 19 bp, Homo sapiens
  Cyclin A1 ribozyme binding site
aaatgaatttagtttccct

SEQ ID NO: 3231 - DNA, 19 bp, Homo sapiens
  Cyclin A1 ribozyme binding site
aatgaatttagtttccctt

SEQ ID NO: 3232 - DNA, 19 bp, Homo sapiens
  Cyclin A1 ribozyme binding site
gaatttagtttcccttaga

SEQ ID NO: 3233 - DNA, 19 bp, Homo sapiens
  Cyclin A1 ribozyme binding site
aatttagtttcccttagac

SEQ ID NO: 3234 - DNA, 19 bp, Homo sapiens
  Cyclin A1 ribozyme binding site
atttagtttcccttagact

SEQ ID NO: 3235 - DNA, 19 bp, Homo sapiens
  Cyclin A1 ribozyme binding site
agtttcccttagactttag

SEQ ID NO: 3236 - DNA, 19 bp, Homo sapiens
  Cyclin A1 ribozyme binding site
gtttcccttagactttagt

SEQ ID NO: 3237 - DNA, 19 bp, Homo sapiens
  Cyclin A1 ribozyme binding site
ccttagactttagtagttt

SEQ ID NO: 3238 - DNA, 19 bp, Homo sapiens
  Cyclin A1 ribozyme binding site
cttagactttagtagtttg

SEQ ID NO: 3239 - DNA, 19 bp, Homo sapiens
  Cyclin A1 ribozyme binding site
ttagactttagtagtttgt

SEQ ID NO: 3240 - DNA, 19 bp, Homo sapiens
  Cyclin A1 ribozyme binding site
gactttagtagtttgtaat

SEQ ID NO: 3241 - DNA, 19 bp, Homo sapiens
  Cyclin A1 ribozyme binding site
tttagtagtttgtaatata

SEQ ID NO: 3242 - DNA, 19 bp, Homo sapiens
  Cyclin A1 ribozyme binding site
ttagtagtttgtaatatag

SEQ ID NO: 3243 - DNA, 19 bp, Homo sapiens
  Cyclin A1 ribozyme binding site
gtagtttgtaatatagtcc

SEQ ID NO: 3244 - DNA, 19 bp, Homo sapiens
  Cyclin A1 ribozyme binding site
gtttgtaatatagtccaac

SEQ ID NO: 3245 - DNA, 19 bp, Homo sapiens
  Cyclin A1 ribozyme binding site
ttgtaatatagtccaacat

SEQ ID NO: 3246 - DNA, 19 bp, Homo sapiens
  Cyclin A1 ribozyme binding site
taatatagtccaacatttt

SEQ ID NO: 3247 - DNA, 19 bp, Homo sapiens
  Cyclin A1 ribozyme binding site
gtccaacattttttaaaca

SEQ ID NO: 3248 - DNA, 19 bp, Homo sapiens
  Cyclin A1 ribozyme binding site
tccaacattttttaaacaa

SEQ ID NO: 3249 - DNA, 19 bp, Homo sapiens
  Cyclin A1 ribozyme binding site
ccaacattttttaaacaat

SEQ ID NO: 3250 - DNA, 19 bp, Homo sapiens
  Cyclin A1 ribozyme binding site
caacattttttaaacaata

SEQ ID NO: 3251 - DNA, 19 bp, Homo sapiens
  Cyclin A1 ribozyme binding site
aacattttttaaacaataa

SEQ ID NO: 3252 - DNA, 19 bp, Homo sapiens
  Cyclin A1 ribozyme binding site
acattttttaaacaataaa

SEQ ID NO: 3253 - DNA, 19 bp, Homo sapiens
  Cyclin A1 ribozyme binding site
ttaaacaataaactgcttg

SEQ ID NO: 3254 - DNA, 19 bp, Homo sapiens
  Cyclin A1 ribozyme binding site
taaactgcttgtcttatga

SEQ ID NO: 3255 - DNA, 19 bp, Homo sapiens
  Cyclin A1 ribozyme binding site
actgcttgtcttatgacaa

SEQ ID NO: 3256 - DNA, 19 bp, Homo sapiens
  Cyclin A1 ribozyme binding site
tgcttgtcttatgacaaaa

SEQ ID NO: 3257 - DNA, 19 bp, Homo sapiens
  Cyclin A1 ribozyme binding site
gcttgtcttatgacaaaaa

SEQ ID NO: 3258 - DNA, 19 bp, Homo sapiens
  Cyclin B1 ribozyme binding site
gctgggtgtaggtccttgg

SEQ ID NO: 3259 - DNA, 19 bp, Homo sapiens
  Cyclin B1 ribozyme binding site
ggtgtaggtccttggctgg

SEQ ID NO: 3260 - DNA, 19 bp, Homo sapiens
  Cyclin B1 ribozyme binding site
gtaggtccttggctggtcg

SEQ ID NO: 3261 - DNA, 19 bp, Homo sapiens
  Cyclin B1 ribozyme binding site
ttggctggtcgggctccgg

SEQ ID NO: 3262 - DNA, 19 bp, Homo sapiens
  Cyclin B1 ribozyme binding site
ggtcgggctccggtgttct

SEQ ID NO: 3263 - DNA, 19 bp, Homo sapiens
  Cyclin B1 ribozyme binding site
ctccggtgttctgcttctc

SEQ ID NO: 3264 - DNA, 19 bp, Homo sapiens
  Cyclin B1 ribozyme binding site
tccggtgttctgcttctcc

SEQ ID NO: 3265 - DNA, 19 bp, Homo sapiens
  Cyclin B1 ribozyme binding site
tgttctgcttctccccgct

SEQ ID NO: 3266 - DNA, 19 bp, Homo sapiens
  Cyclin B1 ribozyme binding site
gttctgcttctccccgctg

SEQ ID NO: 3267 - DNA, 19 bp, Homo sapiens
  Cyclin B1 ribozyme binding site
tctgcttctccccgctgag

SEQ ID NO: 3268 - DNA, 19 bp, Homo sapiens
  Cyclin B1 ribozyme binding site
catggcgctccgagtcacc

SEQ ID NO: 3269 - DNA, 19 bp, Homo sapiens
  Cyclin B1 ribozyme binding site
gctccgagtcaccaggaac

SEQ ID NO: 3270 - DNA, 19 bp, Homo sapiens
  Cyclin B1 ribozyme binding site
ccaggaactcgaaaattaa

SEQ ID NO: 3271 - DNA, 19 bp, Homo sapiens
  Cyclin B1 ribozyme binding site
ctcgaaaattaatgctgaa

SEQ ID NO: 3272 - DNA, 19 bp, Homo sapiens
  Cyclin B1 ribozyme binding site
tcgaaaattaatgctgaaa

SEQ ID NO: 3273 - DNA, 19 bp, Homo sapiens
  Cyclin B1 ribozyme binding site
gctgaaaataaggcgaaga

SEQ ID NO: 3274 - DNA, 19 bp, Homo sapiens
  Cyclin B1 ribozyme binding site
ggcgaagatcaacatggca

SEQ ID NO: 3275 - DNA, 19 bp, Homo sapiens
  Cyclin B1 ribozyme binding site
aaagcgcgttcctacggcc

SEQ ID NO: 3276 - DNA, 19 bp, Homo sapiens
  Cyclin B1 ribozyme binding site
aagcgcgttcctacggccc

SEQ ID NO: 3277 - DNA, 19 bp, Homo sapiens
  Cyclin B1 ribozyme binding site
cgcgttcctacggcccctg

SEQ ID NO: 3278 - DNA, 19 bp, Homo sapiens
  Cyclin B1 ribozyme binding site
ctgcaacctccaagcccgg

SEQ ID NO: 3279 - DNA, 19 bp, Homo sapiens
  Cyclin B1 ribozyme binding site
agaacagctcttggggaca

SEQ ID NO: 3280 - DNA, 19 bp, Homo sapiens
  Cyclin B1 ribozyme binding site
aacagctcttggggacatt

SEQ ID NO: 3281 - DNA, 19 bp, Homo sapiens
  Cyclin B1 ribozyme binding site
tggggacattggtaacaaa

SEQ ID NO: 3282 - DNA, 19 bp, Homo sapiens
  Cyclin B1 ribozyme binding site
gacattggtaacaaagtca

SEQ ID NO: 3283 - DNA, 19 bp, Homo sapiens
  Cyclin B1 ribozyme binding site
taacaaagtcagtgaacaa

SEQ ID NO: 3284 - DNA, 19 bp, Homo sapiens
  Cyclin B1 ribozyme binding site
aaaatgcctatgaagaagg

SEQ ID NO: 3285 - DNA, 19 bp, Homo sapiens
  Cyclin B1 ribozyme binding site
gcaaaaccttcagctactg

SEQ ID NO: 3286 - DNA, 19 bp, Homo sapiens
  Cyclin B1 ribozyme binding site
caaaaccttcagctactgg

SEQ ID NO: 3287 - DNA, 19 bp, Homo sapiens
  Cyclin B1 ribozyme binding site
ccttcagctactggaaaag

SEQ ID NO: 3288 - DNA, 19 bp, Homo sapiens
  Cyclin B1 ribozyme binding site
tggaaaagtcattgataaa

SEQ ID NO: 3289 - DNA, 19 bp, Homo sapiens
  Cyclin B1 ribozyme binding site
aaaagtcattgataaaaaa

SEQ ID NO: 3290 - DNA, 19 bp, Homo sapiens
  Cyclin B1 ribozyme binding site
gtcattgataaaaaactac

SEQ ID NO: 3291 - DNA, 19 bp, Homo sapiens
  Cyclin B1 ribozyme binding site
taaaaaactaccaaaacct

SEQ ID NO: 3292 - DNA, 19 bp, Homo sapiens
  Cyclin B1 ribozyme binding site
ccaaaacctcttgaaaagg

SEQ ID NO: 3293 - DNA, 19 bp, Homo sapiens
  Cyclin B1 ribozyme binding site
aaaacctcttgaaaaggta

SEQ ID NO: 3294 - DNA, 19 bp, Homo sapiens
  Cyclin B1 ribozyme binding site
tgaaaaggtacctatgctg

SEQ ID NO: 3295 - DNA, 19 bp, Homo sapiens
  Cyclin B1 ribozyme binding site
aaggtacctatgctggtgc

SEQ ID NO: 3296 - DNA, 19 bp, Homo sapiens
  Cyclin B1 ribozyme binding site
tgccagtgtctgagccagt

SEQ ID NO: 3297 - DNA, 19 bp, Homo sapiens
  Cyclin B1 ribozyme binding site
tgagcctgttaaagaagaa

SEQ ID NO: 3298 - DNA, 19 bp, Homo sapiens
  Cyclin B1 ribozyme binding site
gagcctgttaaagaagaaa

SEQ ID NO: 3299 - DNA, 19 bp, Homo sapiens
  Cyclin B1 ribozyme binding site
agaaaaactttcgcctgag

SEQ ID NO: 3300 - DNA, 19 bp, Homo sapiens
  Cyclin B1 ribozyme binding site
gaaaaactttcgcctgagc

SEQ ID NO: 3301 - DNA, 19 bp, Homo sapiens
  Cyclin B1 ribozyme binding site
aaaaactttcgcctgagcc

SEQ ID NO: 3302 - DNA, 19 bp, Homo sapiens
  Cyclin B1 ribozyme binding site
cctgagcctattttggttg

SEQ ID NO: 3303 - DNA, 19 bp, Homo sapiens
  Cyclin B1 ribozyme binding site
tgagcctattttggttgat

SEQ ID NO: 3304 - DNA, 19 bp, Homo sapiens
  Cyclin B1 ribozyme binding site
gagcctattttggttgata

SEQ ID NO: 3305 - DNA, 19 bp, Homo sapiens
  Cyclin B1 ribozyme binding site
agcctattttggttgatac

SEQ ID NO: 3306 - DNA, 19 bp, Homo sapiens
  Cyclin B1 ribozyme binding site
tattttggttgatactgcc

SEQ ID NO: 3307 - DNA, 19 bp, Homo sapiens
  Cyclin B1 ribozyme binding site
ttggttgatactgcctctc

SEQ ID NO: 3308 - DNA, 19 bp, Homo sapiens
  Cyclin B1 ribozyme binding site
atactgcctctccaagccc

SEQ ID NO: 3309 - DNA, 19 bp, Homo sapiens
  Cyclin B1 ribozyme binding site
actgcctctccaagcccaa

SEQ ID NO: 3310 - DNA, 19 bp, Homo sapiens
  Cyclin B1 ribozyme binding site
tggaaacatctggatgtgc

SEQ ID NO: 3311 - DNA, 19 bp, Homo sapiens
  Cyclin B1 ribozyme binding site
gacctgtgtcaggctttct

SEQ ID NO: 3312 - DNA, 19 bp, Homo sapiens
  Cyclin B1 ribozyme binding site
tgtcaggctttctctgatg

SEQ ID NO: 3313 - DNA, 19 bp, Homo sapiens
  Cyclin B1 ribozyme binding site
gtcaggctttctctgatgt

SEQ ID NO: 3314 - DNA, 19 bp, Homo sapiens
  Cyclin B1 ribozyme binding site
tcaggctttctctgatgta

SEQ ID NO: 3315 - DNA, 19 bp, Homo sapiens
  Cyclin B1 ribozyme binding site
aggctttctctgatgtaat

SEQ ID NO: 3316 - DNA, 19 bp, Homo sapiens
  Cyclin B1 ribozyme binding site
ctctgatgtaattcttgca

SEQ ID NO: 3317 - DNA, 19 bp, Homo sapiens
  Cyclin B1 ribozyme binding site
tgatgtaattcttgcagta

SEQ ID NO: 3318 - DNA, 19 bp, Homo sapiens
  Cyclin B1 ribozyme binding site
gatgtaattcttgcagtaa

SEQ ID NO: 3319 - DNA, 19 bp, Homo sapiens
  Cyclin B1 ribozyme binding site
tgtaattcttgcagtaaat

SEQ ID NO: 3320 - DNA, 19 bp, Homo sapiens
  Cyclin B1 ribozyme binding site
tcttgcagtaaatgatgtg

SEQ ID NO: 3321 - DNA, 19 bp, Homo sapiens
  Cyclin B1 ribozyme binding site
ggagctgatccaaaccttt

SEQ ID NO: 3322 - DNA, 19 bp, Homo sapiens
  Cyclin B1 ribozyme binding site
tccaaacctttgtagtgaa

SEQ ID NO: 3323 - DNA, 19 bp, Homo sapiens
  Cyclin B1 ribozyme binding site
ccaaacctttgtagtgaat

SEQ ID NO: 3324 - DNA, 19 bp, Homo sapiens
  Cyclin B1 ribozyme binding site
aacctttgtagtgaatatg

SEQ ID NO: 3325 - DNA, 19 bp, Homo sapiens
  Cyclin B1 ribozyme binding site
gtagtgaatatgtgaaaga

SEQ ID NO: 3326 - DNA, 19 bp, Homo sapiens
  Cyclin B1 ribozyme binding site
gtgaaagatatttatgctt

SEQ ID NO: 3327 - DNA, 19 bp, Homo sapiens
  Cyclin B1 ribozyme binding site
gaaagatatttatgcttat

SEQ ID NO: 3328 - DNA, 19 bp, Homo sapiens
  Cyclin B1 ribozyme binding site
aaagatatttatgcttatc

SEQ ID NO: 3329 - DNA, 19 bp, Homo sapiens
  Cyclin B1 ribozyme binding site
aagatatttatgcttatct

SEQ ID NO: 3330 - DNA, 19 bp, Homo sapiens
  Cyclin B1 ribozyme binding site
atttatgcttatctgagac

SEQ ID NO: 3331 - DNA, 19 bp, Homo sapiens
  Cyclin B1 ribozyme binding site
tttatgcttatctgagaca

SEQ ID NO: 3332 - DNA, 19 bp, Homo sapiens
  Cyclin B1 ribozyme binding site
tatgcttatctgagacaac

SEQ ID NO: 3333 - DNA, 19 bp, Homo sapiens
  Cyclin B1 ribozyme binding site
gagacaacttgaggaagag

SEQ ID NO: 3334 - DNA, 19 bp, Homo sapiens
  Cyclin B1 ribozyme binding site
gcaagcagtcagaccaaaa

SEQ ID NO: 3335 - DNA, 19 bp, Homo sapiens
  Cyclin B1 ribozyme binding site
gaccaaaatacctactggg

SEQ ID NO: 3336 - DNA, 19 bp, Homo sapiens
  Cyclin B1 ribozyme binding site
aaaatacctactgggtcgg

SEQ ID NO: 3337 - DNA, 19 bp, Homo sapiens
  Cyclin B1 ribozyme binding site
ctactgggtcgggaagtca

SEQ ID NO: 3338 - DNA, 19 bp, Homo sapiens
  Cyclin B1 ribozyme binding site
tcgggaagtcactggaaac

SEQ ID NO: 3339 - DNA, 19 bp, Homo sapiens
  Cyclin B1 ribozyme binding site
gagagccatcctaattgac

SEQ ID NO: 3340 - DNA, 19 bp, Homo sapiens
  Cyclin B1 ribozyme binding site
agccatcctaattgactgg

SEQ ID NO: 3341 - DNA, 19 bp, Homo sapiens
  Cyclin B1 ribozyme binding site
catcctaattgactggcta

SEQ ID NO: 3342 - DNA, 19 bp, Homo sapiens
  Cyclin B1 ribozyme binding site
tgactggctagtacaggtt

SEQ ID NO: 3343 - DNA, 19 bp, Homo sapiens
  Cyclin B1 ribozyme binding site
ctggctagtacaggttcaa

SEQ ID NO: 3344 - DNA, 19 bp, Homo sapiens
  Cyclin B1 ribozyme binding site
agtacaggttcaaatgaaa

SEQ ID NO: 3345 - DNA, 19 bp, Homo sapiens
  Cyclin B1 ribozyme binding site
gtacaggttcaaatgaaat

SEQ ID NO: 3346 - DNA, 19 bp, Homo sapiens
  Cyclin B1 ribozyme binding site
aaatgaaattcaggttgtt

SEQ ID NO: 3347 - DNA, 19 bp, Homo sapiens
  Cyclin B1 ribozyme binding site
aatgaaattcaggttgttg

SEQ ID NO: 3348 - DNA, 19 bp, Homo sapiens
  Cyclin B1 ribozyme binding site
aattcaggttgttgcagga

SEQ ID NO: 3349 - DNA, 19 bp, Homo sapiens
  Cyclin B1 ribozyme binding site
tcaggttgttgcaggagac

SEQ ID NO: 3350 - DNA, 19 bp, Homo sapiens
  Cyclin B1 ribozyme binding site
agaccatgtacatgactgt

SEQ ID NO: 3351 - DNA, 19 bp, Homo sapiens
  Cyclin B1 ribozyme binding site
catgactgtctccattatt

SEQ ID NO: 3352 - DNA, 19 bp, Homo sapiens
  Cyclin B1 ribozyme binding site
tgactgtctccattattga

SEQ ID NO: 3353 - DNA, 19 bp, Homo sapiens
  Cyclin B1 ribozyme binding site
tgtctccattattgatcgg

SEQ ID NO: 3354 - DNA, 19 bp, Homo sapiens
  Cyclin B1 ribozyme binding site
gtctccattattgatcggt

SEQ ID NO: 3355 - DNA, 19 bp, Homo sapiens
  Cyclin B1 ribozyme binding site
ctccattattgatcggttc

SEQ ID NO: 3356 - DNA, 19 bp, Homo sapiens
  Cyclin B1 ribozyme binding site
attattgatcggttcatgc

SEQ ID NO: 3357 - DNA, 19 bp, Homo sapiens
  Cyclin B1 ribozyme binding site
ttgatcggttcatgcagaa

SEQ ID NO: 3358 - DNA, 19 bp, Homo sapiens
  Cyclin B1 ribozyme binding site
tgatcggttcatgcagaat

SEQ ID NO: 3359 - DNA, 19 bp, Homo sapiens
  Cyclin B1 ribozyme binding site
atgcagaataattgtgtgc

SEQ ID NO: 3360 - DNA, 19 bp, Homo sapiens
  Cyclin B1 ribozyme binding site
cagaataattgtgtgccca

SEQ ID NO: 3361 - DNA, 19 bp, Homo sapiens
  Cyclin B1 ribozyme binding site
gcagctggttggtgtcact

SEQ ID NO: 3362 - DNA, 19 bp, Homo sapiens
  Cyclin B1 ribozyme binding site
ggttggtgtcactgccatg

SEQ ID NO: 3363 - DNA, 19 bp, Homo sapiens
  Cyclin B1 ribozyme binding site
ctgccatgtttattgcaag

SEQ ID NO: 3364 - DNA, 19 bp, Homo sapiens
  Cyclin B1 ribozyme binding site
tgccatgtttattgcaagc

SEQ ID NO: 3365 - DNA, 19 bp, Homo sapiens
  Cyclin B1 ribozyme binding site
gccatgtttattgcaagca

SEQ ID NO: 3366 - DNA, 19 bp, Homo sapiens
  Cyclin B1 ribozyme binding site
catgtttattgcaagcaaa

SEQ ID NO: 3367 - DNA, 19 bp, Homo sapiens
  Cyclin B1 ribozyme binding site
caagcaaatatgaagaaat

SEQ ID NO: 3368 - DNA, 19 bp, Homo sapiens
  Cyclin B1 ribozyme binding site
aagaaatgtaccctccaga

SEQ ID NO: 3369 - DNA, 19 bp, Homo sapiens
  Cyclin B1 ribozyme binding site
atgtaccctccagaaattg

SEQ ID NO: 3370 - DNA, 19 bp, Homo sapiens
  Cyclin B1 ribozyme binding site
tccagaaattggtgacttt

SEQ ID NO: 3371 - DNA, 19 bp, Homo sapiens
  Cyclin B1 ribozyme binding site
ttggtgactttgcttttgt

SEQ ID NO: 3372 - DNA, 19 bp, Homo sapiens
  Cyclin B1 ribozyme binding site
tggtgactttgcttttgtg

SEQ ID NO: 3373 - DNA, 19 bp, Homo sapiens
  Cyclin B1 ribozyme binding site
gactttgcttttgtgactg

SEQ ID NO: 3374 - DNA, 19 bp, Homo sapiens
  Cyclin B1 ribozyme binding site
actttgcttttgtgactga

SEQ ID NO: 3375 - DNA, 19 bp, Homo sapiens
  Cyclin B1 ribozyme binding site
ctttgcttttgtgactgac

SEQ ID NO: 3376 - DNA, 19 bp, Homo sapiens
  Cyclin B1 ribozyme binding site
gacaacacttatactaagc

SEQ ID NO: 3377 - DNA, 19 bp, Homo sapiens
  Cyclin B1 ribozyme binding site
acaacacttatactaagca

SEQ ID NO: 3378 - DNA, 19 bp, Homo sapiens
  Cyclin B1 ribozyme binding site
aacacttatactaagcacc

SEQ ID NO: 3379 - DNA, 19 bp, Homo sapiens
  Cyclin B1 ribozyme binding site
acttatactaagcaccaaa

SEQ ID NO: 3380 - DNA, 19 bp, Homo sapiens
  Cyclin B1 ribozyme binding site
gcaccaaatcagacagatg

SEQ ID NO: 3381 - DNA, 19 bp, Homo sapiens
  Cyclin B1 ribozyme binding site
aatgaagattctaagagct

SEQ ID NO: 3382 - DNA, 19 bp, Homo sapiens
  Cyclin B1 ribozyme binding site
atgaagattctaagagctt

SEQ ID NO: 3383 - DNA, 19 bp, Homo sapiens
  Cyclin B1 ribozyme binding site
gaagattctaagagcttta

SEQ ID NO: 3384 - DNA, 19 bp, Homo sapiens
  Cyclin B1 ribozyme binding site
ctaagagctttaaactttg

SEQ ID NO: 3385 - DNA, 19 bp, Homo sapiens
  Cyclin B1 ribozyme binding site
taagagctttaaactttgg

SEQ ID NO: 3386 - DNA, 19 bp, Homo sapiens
  Cyclin B1 ribozyme binding site
aagagctttaaactttggt

SEQ ID NO: 3387 - DNA, 19 bp, Homo sapiens
  Cyclin B1 ribozyme binding site
ctttaaactttggtctggg

SEQ ID NO: 3388 - DNA, 19 bp, Homo sapiens
  Cyclin B1 ribozyme binding site
tttaaactttggtctgggt

SEQ ID NO: 3389 - DNA, 19 bp, Homo sapiens
  Cyclin B1 ribozyme binding site
aactttggtctgggtcggc

SEQ ID NO: 3390 - DNA, 19 bp, Homo sapiens
  Cyclin B1 ribozyme binding site
ggtctgggtcggcctctac

SEQ ID NO: 3391 - DNA, 19 bp, Homo sapiens
  Cyclin B1 ribozyme binding site
ggtcggcctctacctttgc

SEQ ID NO: 3392 - DNA, 19 bp, Homo sapiens
  Cyclin B1 ribozyme binding site
tcggcctctacctttgcac

SEQ ID NO: 3393 - DNA, 19 bp, Homo sapiens
  Cyclin B1 ribozyme binding site
cctctacctttgcacttcc

SEQ ID NO: 3394 - DNA, 19 bp, Homo sapiens
  Cyclin B1 ribozyme binding site
ctctacctttgcacttcct

SEQ ID NO: 3395 - DNA, 19 bp, Homo sapiens
  Cyclin B1 ribozyme binding site
ctttgcacttccttcggag

SEQ ID NO: 3396 - DNA, 19 bp, Homo sapiens
  Cyclin B1 ribozyme binding site
tttgcacttccttcggaga

SEQ ID NO: 3397 - DNA, 19 bp, Homo sapiens
  Cyclin B1 ribozyme binding site
gcacttccttcggagagca

SEQ ID NO: 3398 - DNA, 19 bp, Homo sapiens
  Cyclin B1 ribozyme binding site
cacttccttcggagagcat

SEQ ID NO: 3399 - DNA, 19 bp, Homo sapiens
  Cyclin B1 ribozyme binding site
ggagagcatctaagattgg

SEQ ID NO: 3400 - DNA, 19 bp, Homo sapiens
  Cyclin B1 ribozyme binding site
agagcatctaagattggag

SEQ ID NO: 3401 - DNA, 19 bp, Homo sapiens
  Cyclin B1 ribozyme binding site
atctaagattggagaggtt

SEQ ID NO: 3402 - DNA, 19 bp, Homo sapiens
  Cyclin B1 ribozyme binding site
tggagaggttgatgtcgag

SEQ ID NO: 3403 - DNA, 19 bp, Homo sapiens
  Cyclin B1 ribozyme binding site
ggttgatgtcgagcaacat

SEQ ID NO: 3404 - DNA, 19 bp, Homo sapiens
  Cyclin B1 ribozyme binding site
gagcaacatactttggcca

SEQ ID NO: 3405 - DNA, 19 bp, Homo sapiens
  Cyclin B1 ribozyme binding site
caacatactttggccaaat

SEQ ID NO: 3406 - DNA, 19 bp, Homo sapiens
  Cyclin B1 ribozyme binding site
aacatactttggccaaata

SEQ ID NO: 3407 - DNA, 19 bp, Homo sapiens
  Cyclin B1 ribozyme binding site
tggccaaatacctgatgga

SEQ ID NO: 3408 - DNA, 19 bp, Homo sapiens
  Cyclin B1 ribozyme binding site
gatggaactaactatgttg

SEQ ID NO: 3409 - DNA, 19 bp, Homo sapiens
  Cyclin B1 ribozyme binding site
gaactaactatgttggact

SEQ ID NO: 3410 - DNA, 19 bp, Homo sapiens
  Cyclin B1 ribozyme binding site
taactatgttggactatga

SEQ ID NO: 3411 - DNA, 19 bp, Homo sapiens
  Cyclin B1 ribozyme binding site
tgttggactatgacatggt

SEQ ID NO: 3412 - DNA, 19 bp, Homo sapiens
  Cyclin B1 ribozyme binding site
tggtgcactttcctccttc

SEQ ID NO: 3413 - DNA, 19 bp, Homo sapiens
  Cyclin B1 ribozyme binding site
ggtgcactttcctccttct

SEQ ID NO: 3414 - DNA, 19 bp, Homo sapiens
  Cyclin B1 ribozyme binding site
gtgcactttcctccttctc

SEQ ID NO: 3415 - DNA, 19 bp, Homo sapiens
  Cyclin B1 ribozyme binding site
cactttcctccttctcaaa

SEQ ID NO: 3416 - DNA, 19 bp, Homo sapiens
  Cyclin B1 ribozyme binding site
tttcctccttctcaaattg

SEQ ID NO: 3417 - DNA, 19 bp, Homo sapiens
  Cyclin B1 ribozyme binding site
ttcctccttctcaaattgc

SEQ ID NO: 3418 - DNA, 19 bp, Homo sapiens
  Cyclin B1 ribozyme binding site
cctccttctcaaattgcag

SEQ ID NO: 3419 - DNA, 19 bp, Homo sapiens
  Cyclin B1 ribozyme binding site
ttctcaaattgcagcagga

SEQ ID NO: 3420 - DNA, 19 bp, Homo sapiens
  Cyclin B1 ribozyme binding site
gcaggagctttttgcttag

SEQ ID NO: 3421 - DNA, 19 bp, Homo sapiens
  Cyclin B1 ribozyme binding site
caggagctttttgcttagc

SEQ ID NO: 3422 - DNA, 19 bp, Homo sapiens
  Cyclin B1 ribozyme binding site
aggagctttttgcttagca

SEQ ID NO: 3423 - DNA, 19 bp, Homo sapiens
  Cyclin B1 ribozyme binding site
ggagctttttgcttagcac

SEQ ID NO: 3424 - DNA, 19 bp, Homo sapiens
  Cyclin B1 ribozyme binding site
ctttttgcttagcactgaa

SEQ ID NO: 3425 - DNA, 19 bp, Homo sapiens
  Cyclin B1 ribozyme binding site
tttttgcttagcactgaaa

SEQ ID NO: 3426 - DNA, 19 bp, Homo sapiens
  Cyclin B1 ribozyme binding site
actgaaaattctggataat

SEQ ID NO: 3427 - DNA, 19 bp, Homo sapiens
  Cyclin B1 ribozyme binding site
ctgaaaattctggataatg

SEQ ID NO: 3428 - DNA, 19 bp, Homo sapiens
  Cyclin B1 ribozyme binding site
attctggataatggtgaat

SEQ ID NO: 3429 - DNA, 19 bp, Homo sapiens
  Cyclin B1 ribozyme binding site
acaccaactctacaacatt

SEQ ID NO: 3430 - DNA, 19 bp, Homo sapiens
  Cyclin B1 ribozyme binding site
accaactctacaacattac

SEQ ID NO: 3431 - DNA, 19 bp, Homo sapiens
  Cyclin B1 ribozyme binding site
ctacaacattacctgtcat

SEQ ID NO: 3432 - DNA, 19 bp, Homo sapiens
  Cyclin B1 ribozyme binding site
tacaacattacctgtcata

SEQ ID NO: 3433 - DNA, 19 bp, Homo sapiens
  Cyclin B1 ribozyme binding site
attacctgtcatatactga

SEQ ID NO: 3434 - DNA, 19 bp, Homo sapiens
  Cyclin B1 ribozyme binding site
acctgtcatatactgaaga

SEQ ID NO: 3435 - DNA, 19 bp, Homo sapiens
  Cyclin B1 ribozyme binding site
ctgtcatatactgaagaat

SEQ ID NO: 3436 - DNA, 19 bp, Homo sapiens
  Cyclin B1 ribozyme binding site
ctgaagaatctcttcttcc

SEQ ID NO: 3437 - DNA, 19 bp, Homo sapiens
  Cyclin B1 ribozyme binding site
gaagaatctcttcttccag

SEQ ID NO: 3438 - DNA, 19 bp, Homo sapiens
  Cyclin B1 ribozyme binding site
agaatctcttcttccagtt

SEQ ID NO: 3439 - DNA, 19 bp, Homo sapiens
  Cyclin B1 ribozyme binding site
gaatctcttcttccagtta

SEQ ID NO: 3440 - DNA, 19 bp, Homo sapiens
  Cyclin B1 ribozyme binding site
atctcttcttccagttatg

SEQ ID NO: 3441 - DNA, 19 bp, Homo sapiens
  Cyclin B1 ribozyme binding site
tctcttcttccagttatgc

SEQ ID NO: 3442 - DNA, 19 bp, Homo sapiens
  Cyclin B1 ribozyme binding site
tcttccagttatgcagcac

SEQ ID NO: 3443 - DNA, 19 bp, Homo sapiens
  Cyclin B1 ribozyme binding site
cttccagttatgcagcacc

SEQ ID NO: 3444 - DNA, 19 bp, Homo sapiens
  Cyclin B1 ribozyme binding site
cacctggctaagaatgtag

SEQ ID NO: 3445 - DNA, 19 bp, Homo sapiens
  Cyclin B1 ribozyme binding site
taagaatgtagtcatggta

SEQ ID NO: 3446 - DNA, 19 bp, Homo sapiens
  Cyclin B1 ribozyme binding site
gaatgtagtcatggtaaat

SEQ ID NO: 3447 - DNA, 19 bp, Homo sapiens
  Cyclin B1 ribozyme binding site
agtcatggtaaatcaagga

SEQ ID NO: 3448 - DNA, 19 bp, Homo sapiens
  Cyclin B1 ribozyme binding site
atggtaaatcaaggactta

SEQ ID NO: 3449 - DNA, 19 bp, Homo sapiens
  Cyclin B1 ribozyme binding site
tcaaggacttacaaagcac

SEQ ID NO: 3450 - DNA, 19 bp, Homo sapiens
  Cyclin B1 ribozyme binding site
caaggacttacaaagcaca

SEQ ID NO: 3451 - DNA, 19 bp, Homo sapiens
  Cyclin B1 ribozyme binding site
catgactgtcaagaacaag

SEQ ID NO: 3452 - DNA, 19 bp, Homo sapiens
  Cyclin B1 ribozyme binding site
agaacaagtatgccacatc

SEQ ID NO: 3453 - DNA, 19 bp, Homo sapiens
  Cyclin B1 ribozyme binding site
atgccacatcgaagcatgc

SEQ ID NO: 3454 - DNA, 19 bp, Homo sapiens
  Cyclin B1 ribozyme binding site
aagcatgctaagatcagca

SEQ ID NO: 3455 - DNA, 19 bp, Homo sapiens
  Cyclin B1 ribozyme binding site
tgctaagatcagcactcta

SEQ ID NO: 3456 - DNA, 19 bp, Homo sapiens
  Cyclin B1 ribozyme binding site
atcagcactctaccacagc

SEQ ID NO: 3457 - DNA, 19 bp, Homo sapiens
  Cyclin B1 ribozyme binding site
cagcactctaccacagctg

SEQ ID NO: 3458 - DNA, 19 bp, Homo sapiens
  Cyclin B1 ribozyme binding site
cagctgaattctgcactag

SEQ ID NO: 3459 - DNA, 19 bp, Homo sapiens
  Cyclin B1 ribozyme binding site
agctgaattctgcactagt

SEQ ID NO: 3460 - DNA, 19 bp, Homo sapiens
  Cyclin B1 ribozyme binding site
ttctgcactagttcaagat

SEQ ID NO: 3461 - DNA, 19 bp, Homo sapiens
  Cyclin B1 ribozyme binding site
tgcactagttcaagattta

SEQ ID NO: 3462 - DNA, 19 bp, Homo sapiens
  Cyclin B1 ribozyme binding site
gcactagttcaagatttag

SEQ ID NO: 3463 - DNA, 19 bp, Homo sapiens
  Cyclin B1 ribozyme binding site
gttcaagatttagccaagg

SEQ ID NO: 3464 - DNA, 19 bp, Homo sapiens
  Cyclin B1 ribozyme binding site
ttcaagatttagccaaggc

SEQ ID NO: 3465 - DNA, 19 bp, Homo sapiens
  Cyclin B1 ribozyme binding site
tcaagatttagccaaggct

SEQ ID NO: 3466 - DNA, 19 bp, Homo sapiens
  Cyclin B1 ribozyme binding site
caaaggtgtaacttgtaaa

SEQ ID NO: 3467 - DNA, 19 bp, Homo sapiens
  Cyclin B1 ribozyme binding site
ggtgtaacttgtaaacttg

SEQ ID NO: 3468 - DNA, 19 bp, Homo sapiens
  Cyclin B1 ribozyme binding site
gtaacttgtaaacttgagt

SEQ ID NO: 3469 - DNA, 19 bp, Homo sapiens
  Cyclin B1 ribozyme binding site
ttgtaaacttgagttggag

SEQ ID NO: 3470 - DNA, 19 bp, Homo sapiens
  Cyclin B1 ribozyme binding site
aacttgagttggagtacta

SEQ ID NO: 3471 - DNA, 19 bp, Homo sapiens
  Cyclin B1 ribozyme binding site
agttggagtactatacttt

SEQ ID NO: 3472 - DNA, 19 bp, Homo sapiens
  Cyclin B1 ribozyme binding site
tggagtactatactttaca

SEQ ID NO: 3473 - DNA, 19 bp, Homo sapiens
  Cyclin B1 ribozyme binding site
gagtactatactttacaaa

SEQ ID NO: 3474 - DNA, 19 bp, Homo sapiens
  Cyclin B1 ribozyme binding site
tactatactttacaaacta

SEQ ID NO: 3475 - DNA, 19 bp, Homo sapiens
  Cyclin B1 ribozyme binding site
actatactttacaaactaa

SEQ ID NO: 3476 - DNA, 19 bp, Homo sapiens
  Cyclin B1 ribozyme binding site
ctatactttacaaactaaa

SEQ ID NO: 3477 - DNA, 19 bp, Homo sapiens
  Cyclin B1 ribozyme binding site
ttacaaactaaaattggca

SEQ ID NO: 3478 - DNA, 19 bp, Homo sapiens
  Cyclin B1 ribozyme binding site
aactaaaattggcacatgt

SEQ ID NO: 3479 - DNA, 19 bp, Homo sapiens
  Cdc25 hs ribozyme binding site
aggaagactctgagtccga

SEQ ID NO: 3480 - DNA, 19 bp, Homo sapiens
  Cdc25 hs ribozyme binding site
actctgagtccgacgttgg

SEQ ID NO: 3481 - DNA, 19 bp, Homo sapiens
  Cdc25 hs ribozyme binding site
gtccgacgttggcctaccc

SEQ ID NO: 3482 - DNA, 19 bp, Homo sapiens
  Cdc25 hs ribozyme binding site
cgttggcctacccagtcgg

SEQ ID NO: 3483 - DNA, 19 bp, Homo sapiens
  Cdc25 hs ribozyme binding site
ctacccagtcggaaggcag

SEQ ID NO: 3484 - DNA, 19 bp, Homo sapiens
  Cdc25 hs ribozyme binding site
agctgcaatctagttaact

SEQ ID NO: 3485 - DNA, 19 bp, Homo sapiens
  Cdc25 hs ribozyme binding site
ctgcaatctagttaactac

SEQ ID NO: 3486 - DNA, 19 bp, Homo sapiens
  Cdc25 hs ribozyme binding site
caatctagttaactacctc

SEQ ID NO: 3487 - DNA, 19 bp, Homo sapiens
  Cdc25 hs ribozyme binding site
aatctagttaactacctcc

SEQ ID NO: 3488 - DNA, 19 bp, Homo sapiens
  Cdc25 hs ribozyme binding site
tagttaactacctcctttc

SEQ ID NO: 3489 - DNA, 19 bp, Homo sapiens
  Cdc25 hs ribozyme binding site
taactacctcctttcccct

SEQ ID NO: 3490 - DNA, 19 bp, Homo sapiens
  Cdc25 hs ribozyme binding site
ctacctcctttcccctaga

SEQ ID NO: 3491 - DNA, 19 bp, Homo sapiens
  Cdc25 hs ribozyme binding site
tacctcctttcccctagat

SEQ ID NO: 3492 - DNA, 19 bp, Homo sapiens
  Cdc25 hs ribozyme binding site
acctcctttcccctagatt

SEQ ID NO: 3493 - DNA, 19 bp, Homo sapiens
  Cdc25 hs ribozyme binding site
ctttcccctagatttcctt

SEQ ID NO: 3494 - DNA, 19 bp, Homo sapiens
  Cdc25 hs ribozyme binding site
cccctagatttcctttcat

SEQ ID NO: 3495 - DNA, 19 bp, Homo sapiens
  Cdc25 hs ribozyme binding site
ccctagatttcctttcatt

SEQ ID NO: 3496 - DNA, 19 bp, Homo sapiens
  Cdc25 hs ribozyme binding site
cctagatttcctttcattc

SEQ ID NO: 3497 - DNA, 19 bp, Homo sapiens
  Cdc25 hs ribozyme binding site
agatttcctttcattctgc

SEQ ID NO: 3498 - DNA, 19 bp, Homo sapiens
  Cdc25 hs ribozyme binding site
gatttcctttcattctgct

SEQ ID NO: 3499 - DNA, 19 bp, Homo sapiens
  Cdc25 hs ribozyme binding site
atttcctttcattctgctc

SEQ ID NO: 3500 - DNA, 19 bp, Homo sapiens
  Cdc25 hs ribozyme binding site
tcctttcattctgctcaag

SEQ ID NO: 3501 - DNA, 19 bp, Homo sapiens
  Cdc25 hs ribozyme binding site
cctttcattctgctcaagt

SEQ ID NO: 3502 - DNA, 19 bp, Homo sapiens
  Cdc25 hs ribozyme binding site
cattctgctcaagtcttcg

SEQ ID NO: 3503 - DNA, 19 bp, Homo sapiens
  Cdc25 hs ribozyme binding site
tgctcaagtcttcgcctgt

SEQ ID NO: 3504 - DNA, 19 bp, Homo sapiens
  Cdc25 hs ribozyme binding site
ctcaagtcttcgcctgtgt

SEQ ID NO: 3505 - DNA, 19 bp, Homo sapiens
  Cdc25 hs ribozyme binding site
tcaagtcttcgcctgtgtc

SEQ ID NO: 3506 - DNA, 19 bp, Homo sapiens
  Cdc25 hs ribozyme binding site
cgcctgtgtccgatcccta

SEQ ID NO: 3507 - DNA, 19 bp, Homo sapiens
  Cdc25 hs ribozyme binding site
gtgtccgatccctatctac

SEQ ID NO: 3508 - DNA, 19 bp, Homo sapiens
  Cdc25 hs ribozyme binding site
ccgatccctatctactttc

SEQ ID NO: 3509 - DNA, 19 bp, Homo sapiens
  Cdc25 hs ribozyme binding site
gatccctatctactttctc

SEQ ID NO: 3510 - DNA, 19 bp, Homo sapiens
  Cdc25 hs ribozyme binding site
tccctatctactttctctc

SEQ ID NO: 3511 - DNA, 19 bp, Homo sapiens
  Cdc25 hs ribozyme binding site
ctatctactttctctcctc

SEQ ID NO: 3512 - DNA, 19 bp, Homo sapiens
  Cdc25 hs ribozyme binding site
tatctactttctctcctct

SEQ ID NO: 3513 - DNA, 19 bp, Homo sapiens
  Cdc25 hs ribozyme binding site
atctactttctctcctctt

SEQ ID NO: 3514 - DNA, 19 bp, Homo sapiens
  Cdc25 hs ribozyme binding site
ctactttctctcctcttgt

SEQ ID NO: 3515 - DNA, 19 bp, Homo sapiens
  Cdc25 hs ribozyme binding site
actttctctcctcttgtag

SEQ ID NO: 3516 - DNA, 19 bp, Homo sapiens
  Cdc25 hs ribozyme binding site
ttctctcctcttgtagcaa

SEQ ID NO: 3517 - DNA, 19 bp, Homo sapiens
  Cdc25 hs ribozyme binding site
ctctcctcttgtagcaagc

SEQ ID NO: 3518 - DNA, 19 bp, Homo sapiens
  Cdc25 hs ribozyme binding site
tcctcttgtagcaagcctc

SEQ ID NO: 3519 - DNA, 19 bp, Homo sapiens
  Cdc25 hs ribozyme binding site
agcaagcctcagactccag

SEQ ID NO: 3520 - DNA, 19 bp, Homo sapiens
  Cdc25 hs ribozyme binding site
cctcagactccaggcttga

SEQ ID NO: 3521 - DNA, 19 bp, Homo sapiens
  Cdc25 hs ribozyme binding site
ctccaggcttgagctaggt

SEQ ID NO: 3522 - DNA, 19 bp, Homo sapiens
  Cdc25 hs ribozyme binding site
gcttgagctaggttttgtt

SEQ ID NO: 3523 - DNA, 19 bp, Homo sapiens
  Cdc25 hs ribozyme binding site
gagctaggttttgtttttc

SEQ ID NO: 3524 - DNA, 19 bp, Homo sapiens
  Cdc25 hs ribozyme binding site
agctaggttttgtttttct

SEQ ID NO: 3525 - DNA, 19 bp, Homo sapiens
  Cdc25 hs ribozyme binding site
gctaggttttgtttttctc

SEQ ID NO: 3526 - DNA, 19 bp, Homo sapiens
  Cdc25 hs ribozyme binding site
aggttttgtttttctcctg

SEQ ID NO: 3527 - DNA, 19 bp, Homo sapiens
  Cdc25 hs ribozyme binding site
ggttttgtttttctcctgg

SEQ ID NO: 3528 - DNA, 19 bp, Homo sapiens
  Cdc25 hs ribozyme binding site
gttttgtttttctcctggt

SEQ ID NO: 3529 - DNA, 19 bp, Homo sapiens
  Cdc25 hs ribozyme binding site
ttttgtttttctcctggtg

SEQ ID NO: 3530 - DNA, 19 bp, Homo sapiens
  Cdc25 hs ribozyme binding site
tttgtttttctcctggtga

SEQ ID NO: 3531 - DNA, 19 bp, Homo sapiens
  Cdc25 hs ribozyme binding site
tgtttttctcctggtgaga

SEQ ID NO: 3532 - DNA, 19 bp, Homo sapiens
  Cdc25 hs ribozyme binding site
ggtgagaattcgaagacca

SEQ ID NO: 3533 - DNA, 19 bp, Homo sapiens
  Cdc25 hs ribozyme binding site
gtgagaattcgaagaccat

SEQ ID NO: 3534 - DNA, 19 bp, Homo sapiens
  Cdc25 hs ribozyme binding site
agaccatgtctacggaact

SEQ ID NO: 3535 - DNA, 19 bp, Homo sapiens
  Cdc25 hs ribozyme binding site
accatgtctacggaactct

SEQ ID NO: 3536 - DNA, 19 bp, Homo sapiens
  Cdc25 hs ribozyme binding site
tacggaactcttctcatcc

SEQ ID NO: 3537 - DNA, 19 bp, Homo sapiens
  Cdc25 hs ribozyme binding site
cggaactcttctcatccac

SEQ ID NO: 3538 - DNA, 19 bp, Homo sapiens
  Cdc25 hs ribozyme binding site
ggaactcttctcatccaca

SEQ ID NO: 3539 - DNA, 19 bp, Homo sapiens
  Cdc25 hs ribozyme binding site
aactcttctcatccacaag

SEQ ID NO: 3540 - DNA, 19 bp, Homo sapiens
  Cdc25 hs ribozyme binding site
tcttctcatccacaagaga

SEQ ID NO: 3541 - DNA, 19 bp, Homo sapiens
  Cdc25 hs ribozyme binding site
aaggaagctctggctcagg

SEQ ID NO: 3542 - DNA, 19 bp, Homo sapiens
  Cdc25 hs ribozyme binding site
gctctggctcaggacccag

SEQ ID NO: 3543 - DNA, 19 bp, Homo sapiens
  Cdc25 hs ribozyme binding site
ggacccagttttaggtcta

SEQ ID NO: 3544 - DNA, 19 bp, Homo sapiens
  Cdc25 hs ribozyme binding site
gacccagttttaggtctaa

SEQ ID NO: 3545 - DNA, 19 bp, Homo sapiens
  Cdc25 hs ribozyme binding site
acccagttttaggtctaat

SEQ ID NO: 3546 - DNA, 19 bp, Homo sapiens
  Cdc25 hs ribozyme binding site
cccagttttaggtctaatc

SEQ ID NO: 3547 - DNA, 19 bp, Homo sapiens
  Cdc25 hs ribozyme binding site
gttttaggtctaacaaagg

SEQ ID NO: 3548 - DNA, 19 bp, Homo sapiens
  Cdc25 hs ribozyme binding site
tttaggtctaatcaaagga

SEQ ID NO: 3549 - DNA, 19 bp, Homo sapiens
  Cdc25 hs ribozyme binding site
aggtctaatcaaaggaaaa

SEQ ID NO: 3550 - DNA, 19 bp, Homo sapiens
  Cdc25 hs ribozyme binding site
ggaaaatgttaaacctgct

SEQ ID NO: 3551 - DNA, 19 bp, Homo sapiens
  Cdc25 hs ribozyme binding site
gaaaatgttaaacctgctc

SEQ ID NO: 3552 - DNA, 19 bp, Homo sapiens
  Cdc25 hs ribozyme binding site
aaacctgctcctggagaga

SEQ ID NO: 3553 - DNA, 19 bp, Homo sapiens
  Cdc25 hs ribozyme binding site
agagacacttcctttaccg

SEQ ID NO: 3554 - DNA, 19 bp, Homo sapiens
  Cdc25 hs ribozyme binding site
gagacacttcctttaccgt

SEQ ID NO: 3555 - DNA, 19 bp, Homo sapiens
  Cdc25 hs ribozyme binding site
acacttcctttaccgtctg

SEQ ID NO: 3556 - DNA, 19 bp, Homo sapiens
  Cdc25 hs ribozyme binding site
cacttcctttaccgtctgt

SEQ ID NO: 3557 - DNA, 19 bp, Homo sapiens
  Cdc25 hs ribozyme binding site
acttcctttaccgtctgtc

SEQ ID NO: 3558 - DNA, 19 bp, Homo sapiens
  Cdc25 hs ribozyme binding site
ctttaccgtctgtccagat

SEQ ID NO: 3559 - DNA, 19 bp, Homo sapiens
  Cdc25 hs ribozyme binding site
accgtctgtccagatgtcc

SEQ ID NO: 3560 - DNA, 19 bp, Homo sapiens
  Cdc25 hs ribozyme binding site
tccagatgtccctagaact

SEQ ID NO: 3561 - DNA, 19 bp, Homo sapiens
  Cdc25 hs ribozyme binding site
gatgtccctagaactccag

SEQ ID NO: 3562 - DNA, 19 bp, Homo sapiens
  Cdc25 hs ribozyme binding site
cctagaactccagtgggca

SEQ ID NO: 3563 - DNA, 19 bp, Homo sapiens
  Cdc25 hs ribozyme binding site
tgggcaaatttcttggtga

SEQ ID NO: 3564 - DNA, 19 bp, Homo sapiens
  Cdc25 hs ribozyme binding site
gggcaaatttcttggtgat

SEQ ID NO: 3565 - DNA, 19 bp, Homo sapiens
  Cdc25 hs ribozyme binding site
ggcaaatttcttggtgatt

SEQ ID NO: 3566 - DNA, 19 bp, Homo sapiens
  Cdc25 hs ribozyme binding site
caaatttcttggtgattct

SEQ ID NO: 3567 - DNA, 19 bp, Homo sapiens
  Cdc25 hs ribozyme binding site
cttggtgattctgcaaacc

SEQ ID NO: 3568 - DNA, 19 bp, Homo sapiens
  Cdc25 hs ribozyme binding site
ttggtgattctgcaaacct

SEQ ID NO: 3569 - DNA, 19 bp, Homo sapiens
  Cdc25 hs ribozyme binding site
tgcaaacctaagcattttg

SEQ ID NO: 3570 - DNA, 19 bp, Homo sapiens
  Cdc25 hs ribozyme binding site
cctaagcattttgtctgga

SEQ ID NO: 3571 - DNA, 19 bp, Homo sapiens
  Cdc25 hs ribozyme binding site
ctaagcattttgtctggag

SEQ ID NO: 3572 - DNA, 19 bp, Homo sapiens
  Cdc25 hs ribozyme binding site
taagcattttgtctggagg

SEQ ID NO: 3573 - DNA, 19 bp, Homo sapiens
  Cdc25 hs ribozyme binding site
gcattttgtctggaggaac

SEQ ID NO: 3574 - DNA, 19 bp, Homo sapiens
  Cdc25 hs ribozyme binding site
ccaaaatgttgcctcgatc

SEQ ID NO: 3575 - DNA, 19 bp, Homo sapiens
  Cdc25 hs ribozyme binding site
atgttgcctcgatctttcg

SEQ ID NO: 3576 - DNA, 19 bp, Homo sapiens
  Cdc25 hs ribozyme binding site
tgcctcgatctttcgaatc

SEQ ID NO: 3577 - DNA, 19 bp, Homo sapiens
  Cdc25 hs ribozyme binding site
cctcgatctttcgaatctt

SEQ ID NO: 3578 - DNA, 19 bp, Homo sapiens
  Cdc25 hs ribozyme binding site
ctcgatctttcgaatctta

SEQ ID NO: 3579 - DNA, 19 bp, Homo sapiens
  Cdc25 hs ribozyme binding site
tcgatctttcgaatcttag

SEQ ID NO: 3580 - DNA, 19 bp, Homo sapiens
  Cdc25 hs ribozyme binding site
ctttcgaatcttagcagtg

SEQ ID NO: 3581 - DNA, 19 bp, Homo sapiens
  Cdc25 hs ribozyme binding site
ttcgaatcttagcagtggg

SEQ ID NO: 3582 - DNA, 19 bp, Homo sapiens
  Cdc25 hs ribozyme binding site
tcgaatcttagcagtgggg

SEQ ID NO: 3583 - DNA, 19 bp, Homo sapiens
  Cdc25 hs ribozyme binding site
tggggagataactgccact

SEQ ID NO: 3584 - DNA, 19 bp, Homo sapiens
  Cdc25 hs ribozyme binding site
actgccactcagcttacca

SEQ ID NO: 3585 - DNA, 19 bp, Homo sapiens
  Cdc25 hs ribozyme binding site
cactcagcttaccacttct

SEQ ID NO: 3586 - DNA, 19 bp, Homo sapiens
  Cdc25 hs ribozyme binding site
actcagcttaccacttctg

SEQ ID NO: 3587 - DNA, 19 bp, Homo sapiens
  Cdc25 hs ribozyme binding site
cttaccacttctgcagacc

SEQ ID NO: 3588 - DNA, 19 bp, Homo sapiens
  Cdc25 hs ribozyme binding site
ttaccacttctgcagacct

SEQ ID NO: 3589 - DNA, 19 bp, Homo sapiens
  Cdc25 hs ribozyme binding site
tgcagaccttgatgaaact

SEQ ID NO: 3590 - DNA, 19 bp, Homo sapiens
  Cdc25 hs ribozyme binding site
gaaactggtcacctggatt

SEQ ID NO: 3591 - DNA, 19 bp, Homo sapiens
  Cdc25 hs ribozyme binding site
cacctggattcttcaggac

SEQ ID NO: 3592 - DNA, 19 bp, Homo sapiens
  Cdc25 hs ribozyme binding site
acctggattcttcaggact

SEQ ID NO: 3593 - DNA, 19 bp, Homo sapiens
  Cdc25 hs ribozyme binding site
ctggattcttcaggacttc

SEQ ID NO: 3594 - DNA, 19 bp, Homo sapiens
  Cdc25 hs ribozyme binding site
tggattcttcaggacttca

SEQ ID NO: 3595 - DNA, 19 bp, Homo sapiens
  Cdc25 hs ribozyme binding site
ttcaggacttcaggaagtg

SEQ ID NO: 3596 - DNA, 19 bp, Homo sapiens
  Cdc25 hs ribozyme binding site
tcaggacttcaggaagtgc

SEQ ID NO: 3597 - DNA, 19 bp, Homo sapiens
  Cdc25 hs ribozyme binding site
gaagtgcatttagctggga

SEQ ID NO: 3598 - DNA, 19 bp, Homo sapiens
  Cdc25 hs ribozyme binding site
aagtgcatttacgtgggat

SEQ ID NO: 3599 - DNA, 19 bp, Homo sapiens
  Cdc25 hs ribozyme binding site
agtgcatttagctgggatg

SEQ ID NO: 3600 - DNA, 19 bp, Homo sapiens
  Cdc25 hs ribozyme binding site
gggatgaatcatgaccagc

SEQ ID NO: 3601 - DNA, 19 bp, Homo sapiens
  Cdc25 hs ribozyme binding site
ccagcacctaatgaaatgt

SEQ ID NO: 3602 - DNA, 19 bp, Homo sapiens
  Cdc25 hs ribozyme binding site
atgaaatgtagcccagcac

SEQ ID NO: 3603 - DNA, 19 bp, Homo sapiens
  Cdc25 hs ribozyme binding site
agcacagcttctttgtagc

SEQ ID NO: 3604 - DNA, 19 bp, Homo sapiens
  Cdc25 hs ribozyme binding site
gcacagcttctttgtagca

SEQ ID NO: 3605 - DNA, 19 bp, Homo sapiens
  Cdc25 hs ribozyme binding site
acagcttctttgtagcact

SEQ ID NO: 3606 - DNA, 19 bp, Homo sapiens
  Cdc25 hs ribozyme binding site
cagcttctttgtagcactc

SEQ ID NO: 3607 - DNA, 19 bp, Homo sapiens
  Cdc25 hs ribozyme binding site
cttctttgtagcactccga

SEQ ID NO: 3608 - DNA, 19 bp, Homo sapiens
  Cdc25 hs ribozyme binding site
tgtagcactccgaatggtt

SEQ ID NO: 3609 - DNA, 19 bp, Homo sapiens
  Cdc25 hs ribozyme binding site
ccgaatggtttggaccgtg

SEQ ID NO: 3610 - DNA, 19 bp, Homo sapiens
  Cdc25 hs ribozyme binding site
cgaatggtttggaccgtgg

SEQ ID NO: 3611 - DNA, 19 bp, Homo sapiens
  Cdc25 hs ribozyme binding site
cgtggccatagaaagagag

SEQ ID NO: 3612 - DNA, 19 bp, Homo sapiens
  Cdc25 hs ribozyme binding site
gcaatgtgtagttcatctg

SEQ ID NO: 3613 - DNA, 19 bp, Homo sapiens
  Cdc25 hs ribozyme binding site
atgtgtagttcatctgcaa

SEQ ID NO: 3614 - DNA, 19 bp, Homo sapiens
  Cdc25 hs ribozyme binding site
tgtgtagttcatctgcaaa

SEQ ID NO: 3615 - DNA, 19 bp, Homo sapiens
  Cdc25 hs ribozyme binding site
gtagttcatctgcaaataa

SEQ ID NO: 3616 - DNA, 19 bp, Homo sapiens
  Cdc25 hs ribozyme binding site
tctgcaaataaagaaaatg

SEQ ID NO: 3617 - DNA, 19 bp, Homo sapiens
  Cdc25 hs ribozyme binding site
atggaaacttggtggacag

SEQ ID NO: 3618 - DNA, 19 bp, Homo sapiens
  Cdc25 hs ribozyme binding site
aaatgaaatatttgggcag

SEQ ID NO: 3619 - DNA, 19 bp, Homo sapiens
  Cdc25 hs ribozyme binding site
atgaaatatttgggcagtc

SEQ ID NO: 3620 - DNA, 19 bp, Homo sapiens
  Cdc25 hs ribozyme binding site
tgaaatatttgggcagtcc

SEQ ID NO: 3621 - DNA, 19 bp, Homo sapiens
  Cdc25 hs ribozyme binding site
ttgggcagtcccattacta

SEQ ID NO: 3622 - DNA, 19 bp, Homo sapiens
  Cdc25 hs ribozyme binding site
cagtcccattactactgtt

SEQ ID NO: 3623 - DNA, 19 bp, Homo sapiens
  Cdc25 hs ribozyme binding site
agtcccattactactgttc

SEQ ID NO: 3624 - DNA, 19 bp, Homo sapiens
  Cdc25 hs ribozyme binding site
cccattactactgttccaa

SEQ ID NO: 3625 - DNA, 19 bp, Homo sapiens
  Cdc25 hs ribozyme binding site
tactactgttccaaaattg

SEQ ID NO: 3626 - DNA, 19 bp, Homo sapiens
  Cdc25 hs ribozyme binding site
ttccaaaattggataaaaa

SEQ ID NO: 3627 - DNA, 19 bp, Homo sapiens
  Cdc25 hs ribozyme binding site
aaattggataaaaatccaa

SEQ ID NO: 3628 - DNA, 19 bp, Homo sapiens
  Cdc25 hs ribozyme binding site
gataaaaatccaaacctag

SEQ ID NO: 3629 - DNA, 19 bp, Homo sapiens
  Cdc25 hs ribozyme binding site
tccaaacctaggagaagac

SEQ ID NO: 3630 - DNA, 19 bp, Homo sapiens
  Cdc25 hs ribozyme binding site
agaagagatttcagatgaa

SEQ ID NO: 3631 - DNA, 19 bp, Homo sapiens
  Cdc25 hs ribozyme binding site
gaagagatttcagatgaat

SEQ ID NO: 3632 - DNA, 19 bp, Homo sapiens
  Cdc25 hs ribozyme binding site
aagagatttcagatgaatt

SEQ ID NO: 3633 - DNA, 19 bp, Homo sapiens
  Cdc25 hs ribozyme binding site
cagatgaattaatggagtt

SEQ ID NO: 3634 - DNA, 19 bp, Homo sapiens
  Cdc25 hs ribozyme binding site
agatgaattaatggagttt

SEQ ID NO: 3635 - DNA, 19 bp, Homo sapiens
  Cdc25 hs ribozyme binding site
taatggagttttccctgaa

SEQ ID NO: 3636 - DNA, 19 bp, Homo sapiens
  Cdc25 hs ribozyme binding site
aatggagttttccctgaaa

SEQ ID NO: 3637 - DNA, 19 bp, Homo sapiens
  Cdc25 hs ribozyme binding site
atggagttttccctgaaag

SEQ ID NO: 3638 - DNA, 19 bp, Homo sapiens
  Cdc25 hs ribozyme binding site
tggagttttccctgaaaga

SEQ ID NO: 3639 - DNA, 19 bp, Homo sapiens
  Cdc25 hs ribozyme binding site
ctgaaagatcaagaagcaa

SEQ ID NO: 3640 - DNA, 19 bp, Homo sapiens
  Cdc25 hs ribozyme binding site
aagtggcctatatcgctcc

SEQ ID NO: 3641 - DNA, 19 bp, Homo sapiens
  Cdc25 hs ribozyme binding site
gtggcctatatcgctcccc

SEQ ID NO: 3642 - DNA, 19 bp, Homo sapiens
  Cdc25 hs ribozyme binding site
ggcctatatcgctccccgt

SEQ ID NO: 3643 - DNA, 19 bp, Homo sapiens
  Cdc25 hs ribozyme binding site
tatatcgctccccgtcgat

SEQ ID NO: 3644 - DNA, 19 bp, Homo sapiens
  Cdc25 hs ribozyme binding site
gctccccgtcgatgccaga

SEQ ID NO: 3645 - DNA, 19 bp, Homo sapiens
  Cdc25 hs ribozyme binding site
cagagaacttgaacaggcc

SEQ ID NO: 3646 - DNA, 19 bp, Homo sapiens
  Cdc25 hs ribozyme binding site
tggaaaaattcaaggacaa

SEQ ID NO: 3647 - DNA, 19 bp, Homo sapiens
  Cdc25 hs ribozyme binding site
ggaaaaattcaaggacaac

SEQ ID NO: 3648 - DNA, 19 bp, Homo sapiens
  Cdc25 hs ribozyme binding site
caacacaataccagataaa

SEQ ID NO: 3649 - DNA, 19 bp, Homo sapiens
  Cdc25 hs ribozyme binding site
ataccagataaagttaaaa

SEQ ID NO: 3650 - DNA, 19 bp, Homo sapiens
  Cdc25 hs ribozyme binding site
agataaagttaaaaaaaag

SEQ ID NO: 3651 - DNA, 19 bp, Homo sapiens
  Cdc25 hs ribozyme binding site
gataaagttaaaaaaaagt

SEQ ID NO: 3652 - DNA, 19 bp, Homo sapiens
  Cdc25 hs ribozyme binding site
aaaaaaagtatttttctgg

SEQ ID NO: 3653 - DNA, 19 bp, Homo sapiens
  Cdc25 hs ribozyme binding site
aaaaagtatttttctggcc

SEQ ID NO: 3654 - DNA, 19 bp, Homo sapiens
  Cdc25 hs ribozyme binding site
aaaagtatttttctggcca

SEQ ID NO: 3655 - DNA, 19 bp, Homo sapiens
  Cdc25 hs ribozyme binding site
aaagtatttttctggccaa

SEQ ID NO: 3656 - DNA, 19 bp, Homo sapiens
  Cdc25 hs ribozyme binding site
aagtatttttctggccaag

SEQ ID NO: 3657 - DNA, 19 bp, Homo sapiens
  Cdc25 hs ribozyme binding site
agtatttttctggccaagg

SEQ ID NO: 3658 - DNA, 19 bp, Homo sapiens
  Cdc25 hs ribozyme binding site
aggaaagctcaggaagggc

SEQ ID NO: 3659 - DNA, 19 bp, Homo sapiens
  Cdc25 hs ribozyme binding site
ggaagggcttatgtttaaa

SEQ ID NO: 3660 - DNA, 19 bp, Homo sapiens
  Cdc25 hs ribozyme binding site
gaagggcttatgtttaaag

SEQ ID NO: 3661 - DNA, 19 bp, Homo sapiens
  Cdc25 hs ribozyme binding site
ggcttatgtttaaagaaga

SEQ ID NO: 3662 - DNA, 19 bp, Homo sapiens
  Cdc25 hs ribozyme binding site
gcttatgtttaaagaagac

SEQ ID NO: 3663 - DNA, 19 bp, Homo sapiens
  Cdc25 hs ribozyme binding site
cttatgtttaaagaagaca

SEQ ID NO: 3664 - DNA, 19 bp, Homo sapiens
  Cdc25 hs ribozyme binding site
gaagacagtctctctgtgt

SEQ ID NO: 3665 - DNA, 19 bp, Homo sapiens
  Cdc25 hs ribozyme binding site
agacagtctctctgtgtga

SEQ ID NO: 3666 - DNA, 19 bp, Homo sapiens
  Cdc25 hs ribozyme binding site
acagtctctctgtgtgaca

SEQ ID NO: 3667 - DNA, 19 bp, Homo sapiens
  Cdc25 hs ribozyme binding site
gtgtgacattactatcact

SEQ ID NO: 3668 - DNA, 19 bp, Homo sapiens
  Cdc25 hs ribozyme binding site
tgtgacattactatcactc

SEQ ID NO: 3669 - DNA, 19 bp, Homo sapiens
  Cdc25 hs ribozyme binding site
gacattactatcactcaga

SEQ ID NO: 3670 - DNA, 19 bp, Homo sapiens
  Cdc25 hs ribozyme binding site
cattactatcactcagatg

SEQ ID NO: 3671 - DNA, 19 bp, Homo sapiens
  Cdc25 hs ribozyme binding site
actatcactcagatgctgg

SEQ ID NO: 3672 - DNA, 19 bp, Homo sapiens
  Cdc25 hs ribozyme binding site
gaggaagattctaaccagg

SEQ ID NO: 3673 - DNA, 19 bp, Homo sapiens
  Cdc25 hs ribozyme binding site
aggaagattctaaccaggg

SEQ ID NO: 3674 - DNA, 19 bp, Homo sapiens
  Cdc25 hs ribozyme binding site
gaagattctaaccaggggc

SEQ ID NO: 3675 - DNA, 19 bp, Homo sapiens
  Cdc25 hs ribozyme binding site
gcacctgattggtgatttt

SEQ ID NO: 3676 - DNA, 19 bp, Homo sapiens
  Cdc25 hs ribozyme binding site
attggtgatttttccaagg

SEQ ID NO: 3677 - DNA, 19 bp, Homo sapiens
  Cdc25 hs ribozyme binding site
ttggtgatttttccaaggt

SEQ ID NO: 3678 - DNA, 19 bp, Homo sapiens
  Cdc25 hs ribozyme binding site
tggtgatttttccaaggta

SEQ ID NO: 3679 - DNA, 19 bp, Homo sapiens
  Cdc25 hs ribozyme binding site
ggtgatttttccaaggtat

SEQ ID NO: 3680 - DNA, 19 bp, Homo sapiens
  Cdc25 hs ribozyme binding site
gtgatttttccaaggtatg

SEQ ID NO: 3681 - DNA, 19 bp, Homo sapiens
  Cdc25 hs ribozyme binding site
ttccaaggtatgtgcgctg

SEQ ID NO: 3682 - DNA, 19 bp, Homo sapiens
  Cdc25 hs ribozyme binding site
caaccgtgtcagggaaaca

SEQ ID NO: 3683 - DNA, 19 bp, Homo sapiens
  Cdc25 hs ribozyme binding site
caccaagatctgaagtatg

SEQ ID NO: 3684 - DNA, 19 bp, Homo sapiens
  Cdc25 hs ribozyme binding site
atctgaagtatgtcaaccc

SEQ ID NO: 3685 - DNA, 19 bp, Homo sapiens
  Cdc25 hs ribozyme binding site
gaagtatgtcaacccagaa

SEQ ID NO: 3686 - DNA, 19 bp, Homo sapiens
  Cdc25 hs ribozyme binding site
tggctgccttactgtcggg

SEQ ID NO: 3687 - DNA, 19 bp, Homo sapiens
  Cdc25 hs ribozyme binding site
ggctgccttactgtcgggg

SEQ ID NO: 3688 - DNA, 19 bp, Homo sapiens
  Cdc25 hs ribozyme binding site
ccttactgtcggggaagtt

SEQ ID NO: 3689 - DNA, 19 bp, Homo sapiens
  Cdc25 hs ribozyme binding site
cggggaagttccagggtct

SEQ ID NO: 3690 - DNA, 19 bp, Homo sapiens
  Cdc25 hs ribozyme binding site
ggggaagttccagggtctg

SEQ ID NO: 3691 - DNA, 19 bp, Homo sapiens
  Cdc25 hs ribozyme binding site
ttccagggtctgattgaga

SEQ ID NO: 3692 - DNA, 19 bp, Homo sapiens
  Cdc25 hs ribozyme binding site
gggtctgattgagaagttt

SEQ ID NO: 3693 - DNA, 19 bp, Homo sapiens
  Cdc25 hs ribozyme binding site
ttgagaagttttatgtcat

SEQ ID NO: 3694 - DNA, 19 bp, Homo sapiens
  Cdc25 hs ribozyme binding site
tgagaagttttatgtcatt

SEQ ID NO: 3695 - DNA, 19 bp, Homo sapiens
  Cdc25 hs ribozyme binding site
gagaagttttatgtcattg

SEQ ID NO: 3696 - DNA, 19 bp, Homo sapiens
  Cdc25 hs ribozyme binding site
agaagttttatgtcattga

SEQ ID NO: 3697 - DNA, 19 bp, Homo sapiens
  Cdc25 hs ribozyme binding site
gttttatgtcattgattgt

SEQ ID NO: 3698 - DNA, 19 bp, Homo sapiens
  Cdc25 hs ribozyme binding site
ttatgtcattgattgtcgc

SEQ ID NO: 3699 - DNA, 19 bp, Homo sapiens
  Cdc25 hs ribozyme binding site
gtcattgattgtcgctatc

SEQ ID NO: 3700 - DNA, 19 bp, Homo sapiens
  Cdc25 hs ribozyme binding site
attgattgtcgctatccat

SEQ ID NO: 3701 - DNA, 19 bp, Homo sapiens
  Cdc25 hs ribozyme binding site
attgtcgctatccatatga

SEQ ID NO: 3702 - DNA, 19 bp, Homo sapiens
  Cdc25 hs ribozyme binding site
tgtcgctatccatatgagt

SEQ ID NO: 3703 - DNA, 19 bp, Homo sapiens
  Cdc25 hs ribozyme binding site
gctatccatatgagtatct

SEQ ID NO: 3704 - DNA, 19 bp, Homo sapiens
  Cdc25 hs ribozyme binding site
catatgagtatctgggagg

SEQ ID NO: 3705 - DNA, 19 bp, Homo sapiens
  Cdc25 hs ribozyme binding site
tatgagtatctgggaggac

SEQ ID NO: 3706 - DNA, 19 bp, Homo sapiens
  Cdc25 hs ribozyme binding site
aggacacatccagggagcc

SEQ ID NO: 3707 - DNA, 19 bp, Homo sapiens
  Cdc25 hs ribozyme binding site
agggagccttaaacttata

SEQ ID NO: 3708 - DNA, 19 bp, Homo sapiens
  Cdc25 hs ribozyme binding site
gggagccttaaacttatat

SEQ ID NO: 3709 - DNA, 19 bp, Homo sapiens
  Cdc25 hs ribozyme binding site
ccttaaacttatatagtca

SEQ ID NO: 3710 - DNA, 19 bp, Homo sapiens
  Cdc25 hs ribozyme binding site
cttaaacttatatagtcag

SEQ ID NO: 3711 - DNA, 19 bp, Homo sapiens
  Cdc25 hs ribozyme binding site
taaacttatatagtcagga

SEQ ID NO: 3712 - DNA, 19 bp, Homo sapiens
  Cdc25 hs ribozyme binding site
aacttatatagtcaggaag

SEQ ID NO: 3713 - DNA, 19 bp, Homo sapiens
  Cdc25 hs ribozyme binding site
ttatatagtcaggaagaac

SEQ ID NO: 3714 - DNA, 19 bp, Homo sapiens
  Cdc25 hs ribozyme binding site
aagaactgtttaacttctt

SEQ ID NO: 3715 - DNA, 19 bp, Homo sapiens
  Cdc25 hs ribozyme binding site
agaactgtttaacttcttt

SEQ ID NO: 3716 - DNA, 19 bp, Homo sapiens
  Cdc25 hs ribozyme binding site
gaactgtttaacttctttc

SEQ ID NO: 3717 - DNA, 19 bp, Homo sapiens
  Cdc25 hs ribozyme binding site
tgtttaacttctttctgaa

SEQ ID NO: 3718 - DNA, 19 bp, Homo sapiens
  Cdc25 hs ribozyme binding site
gtttaacttctttctgaag

SEQ ID NO: 3719 - DNA, 19 bp, Homo sapiens
  Cdc25 hs ribozyme binding site
ttaacttctttctgaagaa

SEQ ID NO: 3720 - DNA, 19 bp, Homo sapiens
  Cdc25 hs ribozyme binding site
taacttctttctgaagaag

SEQ ID NO: 3721 - DNA, 19 bp, Homo sapiens
  Cdc25 hs ribozyme binding site
aacttctttctgaagaagc

SEQ ID NO: 3722 - DNA, 19 bp, Homo sapiens
  Cdc25 hs ribozyme binding site
gaagcccatcgtccctttg

SEQ ID NO: 3723 - DNA, 19 bp, Homo sapiens
  Cdc25 hs ribozyme binding site
gcccatcgtccctttggac

SEQ ID NO: 3724 - DNA, 19 bp, Homo sapiens
  Cdc25 hs ribozyme binding site
atcgtccctttggacaccc

SEQ ID NO: 3725 - DNA, 19 bp, Homo sapiens
  Cdc25 hs ribozyme binding site
tcgtccctttggacaccca

SEQ ID NO: 3726 - DNA, 19 bp, Homo sapiens
  Cdc25 hs ribozyme binding site
gaagagaataatcatcgtg

SEQ ID NO: 3727 - DNA, 19 bp, Homo sapiens
  Cdc25 hs ribozyme binding site
gagaataatcatcgtgttc

SEQ ID NO: 3728 - DNA, 19 bp, Homo sapiens
  Cdc25 hs ribozyme binding site
aataatcatcgtgttccac

SEQ ID NO: 3729 - DNA, 19 bp, Homo sapiens
  Cdc25 hs ribozyme binding site
tcatcgtgttccactgtga

SEQ ID NO: 3730 - DNA, 19 bp, Homo sapiens
  Cdc25 hs ribozyme binding site
catcgtgttccactgtgaa

SEQ ID NO: 3731 - DNA, 19 bp, Homo sapiens
  Cdc25 hs ribozyme binding site
actgtgaattctcctcaga

SEQ ID NO: 3732 - DNA, 19 bp, Homo sapiens
  Cdc25 hs ribozyme binding site
ctgtgaattctcctcagag

SEQ ID NO: 3733 - DNA, 19 bp, Homo sapiens
  Cdc25 hs ribozyme binding site
gtgaattctcctcagagag

SEQ ID NO: 3734 - DNA, 19 bp, Homo sapiens
  Cdc25 hs ribozyme binding site
aattctcctcagagagggg

SEQ ID NO: 3735 - DNA, 19 bp, Homo sapiens
  Cdc25 hs ribozyme binding site
tgccgctgtctgcgtgaag

SEQ ID NO: 3736 - DNA, 19 bp, Homo sapiens
  Cdc25 hs ribozyme binding site
aggacaggtctctgaacca

SEQ ID NO: 3737 - DNA, 19 bp, Homo sapiens
  Cdc25 hs ribozyme binding site
gacaggtctctgaaccagt

SEQ ID NO: 3738 - DNA, 19 bp, Homo sapiens
  Cdc25 hs ribozyme binding site
tgaaccagtatcctgcatt

SEQ ID NO: 3739 - DNA, 19 bp, Homo sapiens
  Cdc25 hs ribozyme binding site
aaccagtatcctgcattgt

SEQ ID NO: 3740 - DNA, 19 bp, Homo sapiens
  Cdc25 hs ribozyme binding site
atcctgcattgtactaccc

SEQ ID NO: 3741 - DNA, 19 bp, Homo sapiens
  Cdc25 hs ribozyme binding site
ctgcattgtactacccaga

SEQ ID NO: 3742 - DNA, 19 bp, Homo sapiens
  Cdc25 hs ribozyme binding site
cattgtactacccagagct

SEQ ID NO: 3743 - DNA, 19 bp, Homo sapiens
  Cdc25 hs ribozyme binding site
cccagagctatatatcctt

SEQ ID NO: 3744 - DNA, 19 bp, Homo sapiens
  Cdc25 hs ribozyme binding site
cagagctatatatccttaa

SEQ ID NO: 3745 - DNA, 19 bp, Homo sapiens
  Cdc25 hs ribozyme binding site
gagctatatatccttaaag

SEQ ID NO: 3746 - DNA, 19 bp, Homo sapiens
  Cdc25 hs ribozyme binding site
gctatatatccttaaaggc

SEQ ID NO: 3747 - DNA, 19 bp, Homo sapiens
  Cdc25 hs ribozyme binding site
atatatccttaaaggcggc

SEQ ID NO: 3748 - DNA, 19 bp, Homo sapiens
  Cdc25 hs ribozyme binding site
tatatccttaaaggcggct

SEQ ID NO: 3749 - DNA, 19 bp, Homo sapiens
  Cdc25 hs ribozyme binding site
aaggcggctacagagactt

SEQ ID NO: 3750 - DNA, 19 bp, Homo sapiens
  Cdc25 hs ribozyme binding site
acagagacttctttccaga

SEQ ID NO: 3751 - DNA, 19 bp, Homo sapiens
  Cdc25 hs ribozyme binding site
cagagacttctttccagaa

SEQ ID NO: 3752 - DNA, 19 bp, Homo sapiens
  Cdc25 hs ribozyme binding site
gagacttctttccagaata

SEQ ID NO: 3753 - DNA, 19 bp, Homo sapiens
  Cdc25 hs ribozyme binding site
agacttctttccagaatat

SEQ ID NO: 3754 - DNA, 19 bp, Homo sapiens
  Cdc25 hs ribozyme binding site
gacttctttccagaatata

SEQ ID NO: 3755 - DNA, 19 bp, Homo sapiens
  Cdc25 hs ribozyme binding site
ttccagaatatatggaact

SEQ ID NO: 3756 - DNA, 19 bp, Homo sapiens
  Cdc25 hs ribozyme binding site
ccagaatatatggaactgt

SEQ ID NO: 3757 - DNA, 19 bp, Homo sapiens
  Cdc25 hs ribozyme binding site
cacagagctactgccctat

SEQ ID NO: 3758 - DNA, 19 bp, Homo sapiens
  Cdc25 hs ribozyme binding site
tactgccctatgcatcatc

SEQ ID NO: 3759 - DNA, 19 bp, Homo sapiens
  Cdc25 hs ribozyme binding site
cctatgcatcatcaggacc

SEQ ID NO: 3760 - DNA, 19 bp, Homo sapiens
  Cdc25 hs ribozyme binding site
atgcatcatcaggaccaca

SEQ ID NO: 3761 - DNA, 19 bp, Homo sapiens
  Cdc25 hs ribozyme binding site
agactgagttgctgaggtg

SEQ ID NO: 3762 - DNA, 19 bp, Homo sapiens
  Cdc25 hs ribozyme binding site
ctgaggtgtcgaagccaga

SEQ ID NO: 3763 - DNA, 19 bp, Homo sapiens
  Cdc25 hs ribozyme binding site
ggagcagattgcccttctg

SEQ ID NO: 3764 - DNA, 19 bp, Homo sapiens
  Cdc25 hs ribozyme binding site
gattgcccttctggtgaag

SEQ ID NO: 3765 - DNA, 19 bp, Homo sapiens
  Cdc25 hs ribozyme binding site
attgcccttctggtgaagg

SEQ ID NO: 3766 - DNA, 19 bp, Homo sapiens
  Cdc25 hs ribozyme binding site
gcccatgataacattccag

SEQ ID NO: 3767 - DNA, 19 bp, Homo sapiens
  Cdc25 hs ribozyme binding site
tgataacattccagccact

SEQ ID NO: 3768 - DNA, 19 bp, Homo sapiens
  Cdc25 hs ribozyme binding site
gataacattccagccactg

SEQ ID NO: 3769 - DNA, 19 bp, Homo sapiens
  Cdc25 hs ribozyme binding site
ctggctgctaacaagtcac

SEQ ID NO: 3770 - DNA, 19 bp, Homo sapiens
  Cdc25 hs ribozyme binding site
ctaacaagtcaccaaaaag

SEQ ID NO: 3771 - DNA, 19 bp, Homo sapiens
  Cdc25 hs ribozyme binding site
aagaggccttctggatggc

SEQ ID NO: 3772 - DNA, 19 bp, Homo sapiens
  Cdc25 hs ribozyme binding site
acccaagattattaaaaga

SEQ ID NO: 3773 - DNA, 19 bp, Homo sapiens
  Cdc25 hs ribozyme binding site
cccaagattattaaaagat

SEQ ID NO: 3774 - DNA, 19 bp, Homo sapiens
  Cdc25 hs ribozyme binding site
caagattattaaaagatgt

SEQ ID NO: 3775 - DNA, 19 bp, Homo sapiens
  Cdc25 hs ribozyme binding site
aagattattaaaagatgtc

SEQ ID NO: 3776 - DNA, 19 bp, Homo sapiens
  Cdc25 hs ribozyme binding site
aaaagatgtctctgcaaac

SEQ ID NO: 3777 - DNA, 19 bp, Homo sapiens
  Cdc25 hs ribozyme binding site
aagatgtctctgcaaacca

SEQ ID NO: 3778 - DNA, 19 bp, Homo sapiens
  Cdc25 hs ribozyme binding site
caacaggctaccaacttgt

SEQ ID NO: 3779 - DNA, 19 bp, Homo sapiens
  Cdc25 hs ribozyme binding site
ctaccaacttgtatccagg

SEQ ID NO: 3780 - DNA, 19 bp, Homo sapiens
  Cdc25 hs ribozyme binding site
ccaacttgtatccaggcct

SEQ ID NO: 3781 - DNA, 19 bp, Homo sapiens
  Cdc25 hs ribozyme binding site
aacttgtatccaggcctgg

SEQ ID NO: 3782 - DNA, 19 bp, Homo sapiens
  Cdc25 hs ribozyme binding site
ggaatggattaggtttcag

SEQ ID NO: 3783 - DNA, 19 bp, Homo sapiens
  Cdc25 hs ribozyme binding site
gaatggattaggtttcagc

SEQ ID NO: 3784 - DNA, 19 bp, Homo sapiens
  Cdc25 hs ribozyme binding site
ggattaggtttcagcagag

SEQ ID NO: 3785 - DNA, 19 bp, Homo sapiens
  Cdc25 hs ribozyme binding site
gattaggtttcagcagagc

SEQ ID NO: 3786 - DNA, 19 bp, Homo sapiens
  Cdc25 hs ribozyme binding site
attaggtttcagcagagct

SEQ ID NO: 3787 - DNA, 19 bp, Homo sapiens
  Cdc25 hs ribozyme binding site
tggcagagtcctggagctg

SEQ ID NO: 3788 - DNA, 19 bp, Homo sapiens
  Cdc25 hs ribozyme binding site
gagctggctctataaggca

SEQ ID NO: 3789 - DNA, 19 bp, Homo sapiens
  Cdc25 hs ribozyme binding site
gctggctctataaggcagc

SEQ ID NO: 3790 - DNA, 19 bp, Homo sapiens
  Cdc25 hs ribozyme binding site
tggctctataaggcagcct

SEQ ID NO: 3791 - DNA, 19 bp, Homo sapiens
  Cdc25 hs ribozyme binding site
aggcagccttgagttgcat

SEQ ID NO: 3792 - DNA, 19 bp, Homo sapiens
  Cdc25 hs ribozyme binding site
gagttgcatagagatttgt

SEQ ID NO: 3793 - DNA, 19 bp, Homo sapiens
  Cdc25 hs ribozyme binding site
catagagatttgtattggt

SEQ ID NO: 3794 - DNA, 19 bp, Homo sapiens
  Cdc25 hs ribozyme binding site
atagagatttgtattggtt

SEQ ID NO: 3795 - DNA, 19 bp, Homo sapiens
  Cdc25 hs ribozyme binding site
gagatttgtattggttcag

SEQ ID NO: 3796 - DNA, 19 bp, Homo sapiens
  Cdc25 hs ribozyme binding site
gatttgtattggttcaggg

SEQ ID NO: 3797 - DNA, 19 bp, Homo sapiens
  Cdc25 hs ribozyme binding site
tgtattggttcagggaact

SEQ ID NO: 3798 - DNA, 19 bp, Homo sapiens
  Cdc25 hs ribozyme binding site
gtattggttcagggaactc

SEQ ID NO: 3799 - DNA, 19 bp, Homo sapiens
  Cdc25 hs ribozyme binding site
cagggaactctggcattcc

SEQ ID NO: 3800 - DNA, 19 bp, Homo sapiens
  Cdc25 hs ribozyme binding site
ctctggcattccttttccc

SEQ ID NO: 3801 - DNA, 19 bp, Homo sapiens
  Cdc25 hs ribozyme binding site
tctggcattccttttccca

SEQ ID NO: 3802 - DNA, 19 bp, Homo sapiens
  Cdc25 hs ribozyme binding site
ggcattccttttcccaact

SEQ ID NO: 3803 - DNA, 19 bp, Homo sapiens
  Cdc25 hs ribozyme binding site
gcattccttttcccaactc

SEQ ID NO: 3804 - DNA, 19 bp, Homo sapiens
  Cdc25 hs ribozyme binding site
cattccttttcccaactcc

SEQ ID NO: 3805 - DNA, 19 bp, Homo sapiens
  Cdc25 hs ribozyme binding site
attccttttcccaactcct

SEQ ID NO: 3806 - DNA, 19 bp, Homo sapiens
  Cdc25 hs ribozyme binding site
ttcccaactcctcatgtct

SEQ ID NO: 3807 - DNA, 19 bp, Homo sapiens
  Cdc25 hs ribozyme binding site
ccaactcctcatgtcttct

SEQ ID NO: 3808 - DNA, 19 bp, Homo sapiens
  Cdc25 hs ribozyme binding site
tcctcatgtcttctcacaa

SEQ ID NO: 3809 - DNA, 19 bp, Homo sapiens
  Cdc25 hs ribozyme binding site
ctcatgtcttctcacaagc

SEQ ID NO: 3810 - DNA, 19 bp, Homo sapiens
  Cdc25 hs ribozyme binding site
tcatgtcttctcacaagcc

SEQ ID NO: 3811 - DNA, 19 bp, Homo sapiens
  Cdc25 hs ribozyme binding site
atgtcttctcacaagccag

SEQ ID NO: 3812 - DNA, 19 bp, Homo sapiens
  Cdc25 hs ribozyme binding site
cagccaactctttctctct

SEQ ID NO: 3813 - DNA, 19 bp, Homo sapiens
  Cdc25 hs ribozyme binding site
gccaactctttctctctgg

SEQ ID NO: 3814 - DNA, 19 bp, Homo sapiens
  Cdc25 hs ribozyme binding site
ccaactctttctctctggg

SEQ ID NO: 3815 - DNA, 19 bp, Homo sapiens
  Cdc25 hs ribozyme binding site
caactctttctctctgggc

SEQ ID NO: 3816 - DNA, 19 bp, Homo sapiens
  Cdc25 hs ribozyme binding site
actctttctctctgggctt

SEQ ID NO: 3817 - DNA, 19 bp, Homo sapiens
  Cdc25 hs ribozyme binding site
tctttctctctgggcttcg

SEQ ID NO: 3818 - DNA, 19 bp, Homo sapiens
  Cdc25 hs ribozyme binding site
ctctgggcttcgggctatg

SEQ ID NO: 3819 - DNA, 19 bp, Homo sapiens
  Cdc25 hs ribozyme binding site
tctgggcttcgggctatgc

SEQ ID NO: 3820 - DNA, 19 bp, Homo sapiens
  Cdc25 hs ribozyme binding site
cttcgggctatgcaagagc

SEQ ID NO: 3821 - DNA, 19 bp, Homo sapiens
  Cdc25 hs ribozyme binding site
caagagcgttgtctacctt

SEQ ID NO: 3822 - DNA, 19 bp, Homo sapiens
  Cdc25 hs ribozyme binding site
gagcgttgtctaccttctt

SEQ ID NO: 3823 - DNA, 19 bp, Homo sapiens
  Cdc25 hs ribozyme binding site
gcgttgtctaccttctttc

SEQ ID NO: 3824 - DNA, 19 bp, Homo sapiens
  Cdc25 hs ribozyme binding site
tgtctaccttctttctttg

SEQ ID NO: 3825 - DNA, 19 bp, Homo sapiens
  Cdc25 hs ribozyme binding site
gtctaccttctttctttgt

SEQ ID NO: 3826 - DNA, 19 bp, Homo sapiens
  Cdc25 hs ribozyme binding site
ctaccttctttctttgtat

SEQ ID NO: 3827 - DNA, 19 bp, Homo sapiens
  Cdc25 hs ribozyme binding site
taccttctttctttgtatt

SEQ ID NO: 3828 - DNA, 19 bp, Homo sapiens
  Cdc25 hs ribozyme binding site
accttctttctttgtattt

SEQ ID NO: 3829 - DNA, 19 bp, Homo sapiens
  Cdc25 hs ribozyme binding site
cttctttctttgtattttc

SEQ ID NO: 3830 - DNA, 19 bp, Homo sapiens
  Cdc25 hs ribozyme binding site
ttctttctttgtattttcc

SEQ ID NO: 3831 - DNA, 19 bp, Homo sapiens
  Cdc25 hs ribozyme binding site
tttctttgtattttccttc

SEQ ID NO: 3832 - DNA, 19 bp, Homo sapiens
  Cdc25 hs ribozyme binding site
tctttgtattttccttctt

SEQ ID NO: 3833 - DNA, 19 bp, Homo sapiens
  Cdc25 hs ribozyme binding site
ctttgtattttccttcttt

SEQ ID NO: 3834 - DNA, 19 bp, Homo sapiens
  Cdc25 hs ribozyme binding site
tttgtattttccttctttg

SEQ ID NO: 3835 - DNA, 19 bp, Homo sapiens
  Cdc25 hs ribozyme binding site
ttgtattttccttctttgt

SEQ ID NO: 3836 - DNA, 19 bp, Homo sapiens
  Cdc25 hs ribozyme binding site
tattttccttctttgtttc

SEQ ID NO: 3837 - DNA, 19 bp, Homo sapiens
  Cdc25 hs ribozyme binding site
attttccttctttgtttcc

SEQ ID NO: 3838 - DNA, 19 bp, Homo sapiens
  Cdc25 hs ribozyme binding site
tttccttctttgtttcccc

SEQ ID NO: 3839 - DNA, 19 bp, Homo sapiens
  Cdc25 hs ribozyme binding site
ttccttctttgtttccccc

SEQ ID NO: 3840 - DNA, 19 bp, Homo sapiens
  Cdc25 hs ribozyme binding site
cttctttgtttccccctct

SEQ ID NO: 3841 - DNA, 19 bp, Homo sapiens
  Cdc25 hs ribozyme binding site
ttctttgtttccccctctt

SEQ ID NO: 3842 - DNA, 19 bp, Homo sapiens
  Cdc25 hs ribozyme binding site
tctttgtttccccctcttt

SEQ ID NO: 3843 - DNA, 19 bp, Homo sapiens
  Cdc25 hs ribozyme binding site
tttccccctctttcttttt

SEQ ID NO: 3844 - DNA, 19 bp, Homo sapiens
  Cdc25 hs ribozyme binding site
tccccctctttctttttta

SEQ ID NO: 3845 - DNA, 19 bp, Homo sapiens
  Cdc25 hs ribozyme binding site
ccccctctttcttttttaa

SEQ ID NO: 3846 - DNA, 19 bp, Homo sapiens
  Cdc25 hs ribozyme binding site
cccctctttcttttttaaa

SEQ ID NO: 3847 - DNA, 19 bp, Homo sapiens
  Cdc25 hs ribozyme binding site
cctctttcttttttaaaaa

SEQ ID NO: 3848 - DNA, 19 bp, Homo sapiens
  Cdc25 hs ribozyme binding site
ctctttcttttttaaaaat

SEQ ID NO: 3849 - DNA, 19 bp, Homo sapiens
  Cdc25 hs ribozyme binding site
tctttcttttttaaaaatg

SEQ ID NO: 3850 - DNA, 19 bp, Homo sapiens
  Cdc25 hs ribozyme binding site
ctttcttttttaaaaatgg

SEQ ID NO: 3851 - DNA, 19 bp, Homo sapiens
  Cdc25 hs ribozyme binding site
tttcttttttaaaaatgga

SEQ ID NO: 3852 - DNA, 19 bp, Homo sapiens
  Cdc25 hs ribozyme binding site
ttcttttttaaaaatggaa

SEQ ID NO: 3853 - DNA, 19 bp, Homo sapiens
  Cdc25 hs ribozyme binding site
tggaaaaataaacactaca

SEQ ID NO: 3854 - DNA, 19 bp, Homo sapiens
  Cdc25 hs ribozyme binding site
ataaacactacagaatgag

SEQ ID NO: 3855 - DNA, 19 bp, Homo sapiens
  PCNA HH ribozyme binding site
ttaaacggttgcaggcgta

SEQ ID NO: 3856 - DNA, 19 bp, Homo sapiens
  PCNA HH ribozyme binding site
tgcaggcgtagagagtggt

SEQ ID NO: 3857 - DNA, 19 bp, Homo sapiens
  PCNA HH ribozyme binding site
gagagtggtcgttgtcttt

SEQ ID NO: 3858 - DNA, 19 bp, Homo sapiens
  PCNA HH ribozyme binding site
agtggtcgttgtctttcta

SEQ ID NO: 3859 - DNA, 19 bp, Homo sapiens
  PCNA HH ribozyme binding site
ggtcgttgtctttctaggt

SEQ ID NO: 3860 - DNA, 19 bp, Homo sapiens
  PCNA HH ribozyme binding site
tcgttgtctttctaggtct

SEQ ID NO: 3861 - DNA, 19 bp, Homo sapiens
  PCNA HH ribozyme binding site
cgttgtctttctaggtctc

SEQ ID NO: 3862 - DNA, 19 bp, Homo sapiens
  PCNA HH ribozyme binding site
gttgtctttctaggtctca

SEQ ID NO: 3863 - DNA, 19 bp, Homo sapiens
  PCNA HH ribozyme binding site
tgtctttctaggtctcagc

SEQ ID NO: 3864 - DNA, 19 bp, Homo sapiens
  PCNA HH ribozyme binding site
tttctaggtctcagccggt

SEQ ID NO: 3865 - DNA, 19 bp, Homo sapiens
  PCNA HH ribozyme binding site
tctaggtctcagccggtcg

SEQ ID NO: 3866 - DNA, 19 bp, Homo sapiens
  PCNA HH ribozyme binding site
tcagccggtcgtcgcgacg

SEQ ID NO: 3867 - DNA, 19 bp, Homo sapiens
  PCNA HH ribozyme binding site
gccggtcgtcgcgacgttc

SEQ ID NO: 3868 - DNA, 19 bp, Homo sapiens
  PCNA HH ribozyme binding site
tcgcgacgttcgcccgctc

SEQ ID NO: 3869 - DNA, 19 bp, Homo sapiens
  PCNA HH ribozyme binding site
cgcgacgttcgcccgctct

SEQ ID NO: 3870 - DNA, 19 bp, Homo sapiens
  PCNA HH ribozyme binding site
tcgcccgctctgaggctcc

SEQ ID NO: 3871 - DNA, 19 bp, Homo sapiens
  PCNA HH ribozyme binding site
tctgaggctcctgaagccg

SEQ ID NO: 3872 - DNA, 19 bp, Homo sapiens
  PCNA HH ribozyme binding site
gccgaaactagctagactt

SEQ ID NO: 3873 - DNA, 19 bp, Homo sapiens
  PCNA HH ribozyme binding site
aaactagctagactttcct

SEQ ID NO: 3874 - DNA, 19 bp, Homo sapiens
  PCNA HH ribozyme binding site
agctagactttcctccttc

SEQ ID NO: 3875 - DNA, 19 bp, Homo sapiens
  PCNA HH ribozyme binding site
gctagactttcctccttcc

SEQ ID NO: 3876 - DNA, 19 bp, Homo sapiens
  PCNA HH ribozyme binding site
ctagactttcctccttccc

SEQ ID NO: 3877 - DNA, 19 bp, Homo sapiens
  PCNA HH ribozyme binding site
gactttcctccttcccgcc

SEQ ID NO: 3878 - DNA, 19 bp, Homo sapiens
  PCNA HH ribozyme binding site
tttcctccttcccgcctgc

SEQ ID NO: 3879 - DNA, 19 bp, Homo sapiens
  PCNA HH ribozyme binding site
ttcctccttcccgcctgcc

SEQ ID NO: 3880 - DNA, 19 bp, Homo sapiens
  PCNA HH ribozyme binding site
cctgcctgtagcggcgttg

SEQ ID NO: 3881 - DNA, 19 bp, Homo sapiens
  PCNA HH ribozyme binding site
tagcggcgttgccactccg

SEQ ID NO: 3882 - DNA, 19 bp, Homo sapiens
  PCNA HH ribozyme binding site
gttgccactccgccaccat

SEQ ID NO: 3883 - DNA, 19 bp, Homo sapiens
  PCNA HH ribozyme binding site
ccaccatgttcgaggcgcg

SEQ ID NO: 3884 - DNA, 19 bp, Homo sapiens
  PCNA HH ribozyme binding site
caccatgttcgaggcgcgc

SEQ ID NO: 3885 - DNA, 19 bp, Homo sapiens
  PCNA HH ribozyme binding site
gcgcctggtccagggctcc

SEQ ID NO: 3886 - DNA, 19 bp, Homo sapiens
  PCNA HH ribozyme binding site
tccagggctccatcctcaa

SEQ ID NO: 3887 - DNA, 19 bp, Homo sapiens
  PCNA HH ribozyme binding site
gggctccatcctcaagaag

SEQ ID NO: 3888 - DNA, 19 bp, Homo sapiens
  PCNA HH ribozyme binding site
ctccatcctcaagaaggtg

SEQ ID NO: 3889 - DNA, 19 bp, Homo sapiens
  PCNA HH ribozyme binding site
agaaggtgttggaggcact

SEQ ID NO: 3890 - DNA, 19 bp, Homo sapiens
  PCNA HH ribozyme binding site
ggaggcactcaaggacctc

SEQ ID NO: 3891 - DNA, 19 bp, Homo sapiens
  PCNA HH ribozyme binding site
caaggacctcatcaacgag

SEQ ID NO: 3892 - DNA, 19 bp, Homo sapiens
  PCNA HH ribozyme binding site
ggacctcatcaacgaggcc

SEQ ID NO: 3893 - DNA, 19 bp, Homo sapiens
  PCNA HH ribozyme binding site
tgctgggatattagctcca

SEQ ID NO: 3894 - DNA, 19 bp, Homo sapiens
  PCNA HH ribozyme binding site
ctgggatattagctccagc

SEQ ID NO: 3895 - DNA, 19 bp, Homo sapiens
  PCNA HH ribozyme binding site
tgggatattagctccagcg

SEQ ID NO: 3896 - DNA, 19 bp, Homo sapiens
  PCNA HH ribozyme binding site
atattagctccagcggtgt

SEQ ID NO: 3897 - DNA, 19 bp, Homo sapiens
  PCNA HH ribozyme binding site
cagcggtgtaaacctgcag

SEQ ID NO: 3898 - DNA, 19 bp, Homo sapiens
  PCNA HH ribozyme binding site
gcatggactcgtcccacgt

SEQ ID NO: 3899 - DNA, 19 bp, Homo sapiens
  PCNA HH ribozyme binding site
tggactcgtcccacgtctc

SEQ ID NO: 3900 - DNA, 19 bp, Homo sapiens
  PCNA HH ribozyme binding site
gtcccacgtctctttggtg

SEQ ID NO: 3901 - DNA, 19 bp, Homo sapiens
  PCNA HH ribozyme binding site
cccacgtctctttggtgca

SEQ ID NO: 3902 - DNA, 19 bp, Homo sapiens
  PCNA HH ribozyme binding site
cacgtctctttggtgcagc

SEQ ID NO: 3903 - DNA, 19 bp, Homo sapiens
  PCNA HH ribozyme binding site
acgtctctttggtgcagct

SEQ ID NO: 3904 - DNA, 19 bp, Homo sapiens
  PCNA HH ribozyme binding site
ggtgcagctcaccctgcgg

SEQ ID NO: 3905 - DNA, 19 bp, Homo sapiens
  PCNA HH ribozyme binding site
ccctgcggtctgagggctt

SEQ ID NO: 3906 - DNA, 19 bp, Homo sapiens
  PCNA HH ribozyme binding site
ctgagggcttcgacaccta

SEQ ID NO: 3907 - DNA, 19 bp, Homo sapiens
  PCNA HH ribozyme binding site
tgagggcttcgacacctac

SEQ ID NO: 3908 - DNA, 19 bp, Homo sapiens
  PCNA HH ribozyme binding site
tcgacacctaccgctgcga

SEQ ID NO: 3909 - DNA, 19 bp, Homo sapiens
  PCNA HH ribozyme binding site
cgtgaacctcaccagtatg

SEQ ID NO: 3910 - DNA, 19 bp, Homo sapiens
  PCNA HH ribozyme binding site
ctcaccagtatgtccaaaa

SEQ ID NO: 3911 - DNA, 19 bp, Homo sapiens
  PCNA HH ribozyme binding site
ccagtatgtccaaaatact

SEQ ID NO: 3912 - DNA, 19 bp, Homo sapiens
  PCNA HH ribozyme binding site
gtccaaaatactaaaatgc

SEQ ID NO: 3913 - DNA, 19 bp, Homo sapiens
  PCNA HH ribozyme binding site
caaaatactaaaatgcgcc

SEQ ID NO: 3914 - DNA, 19 bp, Homo sapiens
  PCNA HH ribozyme binding site
aatgaagatatcattacac

SEQ ID NO: 3915 - DNA, 19 bp, Homo sapiens
  PCNA HH ribozyme binding site
tgaagatatcattacacta

SEQ ID NO: 3916 - DNA, 19 bp, Homo sapiens
  PCNA HH ribozyme binding site
agatatcattacactaagg

SEQ ID NO: 3917 - DNA, 19 bp, Homo sapiens
  PCNA HH ribozyme binding site
gatatcattacactaaggg

SEQ ID NO: 3918 - DNA, 19 bp, Homo sapiens
  PCNA HH ribozyme binding site
cattacactaagggccgaa

SEQ ID NO: 3919 - DNA, 19 bp, Homo sapiens
  PCNA HH ribozyme binding site
gccgaagataacgcggata

SEQ ID NO: 3920 - DNA, 19 bp, Homo sapiens
  PCNA HH ribozyme binding site
aacgcggataccttggcgc

SEQ ID NO: 3921 - DNA, 19 bp, Homo sapiens
  PCNA HH ribozyme binding site
cggataccttggcgctagt

SEQ ID NO: 3922 - DNA, 19 bp, Homo sapiens
  PCNA HH ribozyme binding site
cttggcgctagtatttgaa

SEQ ID NO: 3923 - DNA, 19 bp, Homo sapiens
  PCNA HH ribozyme binding site
ggcgctagtatttgaagca

SEQ ID NO: 3924 - DNA, 19 bp, Homo sapiens
  PCNA HH ribozyme binding site
cgctagtatttgaagcacc

SEQ ID NO: 3925 - DNA, 19 bp, Homo sapiens
  PCNA HH ribozyme binding site
gctagtatttgaagcacca

SEQ ID NO: 3926 - DNA, 19 bp, Homo sapiens
  PCNA HH ribozyme binding site
ggagaaagtttcagactat

SEQ ID NO: 3927 - DNA, 19 bp, Homo sapiens
  PCNA HH ribozyme binding site
gagaaagtttcagactatg

SEQ ID NO: 3928 - DNA, 19 bp, Homo sapiens
  PCNA HH ribozyme binding site
agaaagtttcagactatga

SEQ ID NO: 3929 - DNA, 19 bp, Homo sapiens
  PCNA HH ribozyme binding site
tttcagactatgaaatgaa

SEQ ID NO: 3930 - DNA, 19 bp, Homo sapiens
  PCNA HH ribozyme binding site
aaatgaagttgatggattt

SEQ ID NO: 3931 - DNA, 19 bp, Homo sapiens
  PCNA HH ribozyme binding site
ttgatggatttagatgttg

SEQ ID NO: 3932 - DNA, 19 bp, Homo sapiens
  PCNA HH ribozyme binding site
tgatggatttagatgttga

SEQ ID NO: 3933 - DNA, 19 bp, Homo sapiens
  PCNA HH ribozyme binding site
gatggatttagatgttgaa

SEQ ID NO: 3934 - DNA, 19 bp, Homo sapiens
  PCNA HH ribozyme binding site
tttagatgttgaacaactt

SEQ ID NO: 3935 - DNA, 19 bp, Homo sapiens
  PCNA HH ribozyme binding site
tgaacaacttggaattcca

SEQ ID NO: 3936 - DNA, 19 bp, Homo sapiens
  PCNA HH ribozyme binding site
acttggaattccagaacag

SEQ ID NO: 3937 - DNA, 19 bp, Homo sapiens
  PCNA HH ribozyme binding site
cttggaattccagaacagg

SEQ ID NO: 3938 - DNA, 19 bp, Homo sapiens
  PCNA HH ribozyme binding site
aacaggagtacagctgtgt

SEQ ID NO: 3939 - DNA, 19 bp, Homo sapiens
  PCNA HH ribozyme binding site
cagctgtgtagtaaagatg

SEQ ID NO: 3940 - DNA, 19 bp, Homo sapiens
  PCNA HH ribozyme binding site
ctgtgtagtaaagatgcct

SEQ ID NO: 3941 - DNA, 19 bp, Homo sapiens
  PCNA HH ribozyme binding site
aagatgccttctggtgaat

SEQ ID NO: 3942 - DNA, 19 bp, Homo sapiens
  PCNA HH ribozyme binding site
agatgccttctggtgaatt

SEQ ID NO: 3943 - DNA, 19 bp, Homo sapiens
  PCNA HH ribozyme binding site
ctggtgaatttgcacgtat

SEQ ID NO: 3944 - DNA, 19 bp, Homo sapiens
  PCNA HH ribozyme binding site
tggtgaatttgcacgtata

SEQ ID NO: 3945 - DNA, 19 bp, Homo sapiens
  PCNA HH ribozyme binding site
tttgcacgtatatgccgag

SEQ ID NO: 3946 - DNA, 19 bp, Homo sapiens
  PCNA HH ribozyme binding site
tgcacgtatatgccgagat

SEQ ID NO: 3947 - DNA, 19 bp, Homo sapiens
  PCNA HH ribozyme binding site
tgccgagatctcagccata

SEQ ID NO: 3948 - DNA, 19 bp, Homo sapiens
  PCNA HH ribozyme binding site
ccgagatctcagccatatt

SEQ ID NO: 3949 - DNA, 19 bp, Homo sapiens
  PCNA HH ribozyme binding site
ctcagccatattggagatg

SEQ ID NO: 3950 - DNA, 19 bp, Homo sapiens
  PCNA HH ribozyme binding site
cagccatattggagatgct

SEQ ID NO: 3951 - DNA, 19 bp, Homo sapiens
  PCNA HH ribozyme binding site
agatgctgttgtaatttcc

SEQ ID NO: 3952 - DNA, 19 bp, Homo sapiens
  PCNA HH ribozyme binding site
tgctgttgtaatttcctgt

SEQ ID NO: 3953 - DNA, 19 bp, Homo sapiens
  PCNA HH ribozyme binding site
tgttgtaatttcctgtgca

SEQ ID NO: 3954 - DNA, 19 bp, Homo sapiens
  PCNA HH ribozyme binding site
gttgtaatttcctgtgcaa

SEQ ID NO: 3955 - DNA, 19 bp, Homo sapiens
  PCNA HH ribozyme binding site
ttgtaatttcctgtgcaaa

SEQ ID NO: 3956 - DNA, 19 bp, Homo sapiens
  PCNA HH ribozyme binding site
gagtgaaattttctgcaag

SEQ ID NO: 3957 - DNA, 19 bp, Homo sapiens
  PCNA HH ribozyme binding site
agtgaaattttctgcaagt

SEQ ID NO: 3958 - DNA, 19 bp, Homo sapiens
  PCNA HH ribozyme binding site
gtgaaattttctgcaagtg

SEQ ID NO: 3959 - DNA, 19 bp, Homo sapiens
  PCNA HH ribozyme binding site
tgaaattttctgcaagtgg

SEQ ID NO: 3960 - DNA, 19 bp, Homo sapiens
  PCNA HH ribozyme binding site
tggagaacttggaaatgga

SEQ ID NO: 3961 - DNA, 19 bp, Homo sapiens
  PCNA HH ribozyme binding site
tggaaacattaaattgtca

SEQ ID NO: 3962 - DNA, 19 bp, Homo sapiens
  PCNA HH ribozyme binding site
ggaaacattaaattgtcac

SEQ ID NO: 3963 - DNA, 19 bp, Homo sapiens
  PCNA HH ribozyme binding site
acattaaattgtcacagac

SEQ ID NO: 3964 - DNA, 19 bp, Homo sapiens
  PCNA HH ribozyme binding site
ttaaattgtcacagacaag

SEQ ID NO: 3965 - DNA, 19 bp, Homo sapiens
  PCNA HH ribozyme binding site
cagacaagtaatgtcgata

SEQ ID NO: 3966 - DNA, 19 bp, Homo sapiens
  PCNA HH ribozyme binding site
aagtaatgtcgataaagag

SEQ ID NO: 3967 - DNA, 19 bp, Homo sapiens
  PCNA HH ribozyme binding site
aatgtcgataaagaggagg

SEQ ID NO: 3968 - DNA, 19 bp, Homo sapiens
  PCNA HH ribozyme binding site
ggaagctgttaccatagag

SEQ ID NO: 3969 - DNA, 19 bp, Homo sapiens
  PCNA HH ribozyme binding site
gaagctgttaccatagaga

SEQ ID NO: 3970 - DNA, 19 bp, Homo sapiens
  PCNA HH ribozyme binding site
tgttaccatagagatgaat

SEQ ID NO: 3971 - DNA, 19 bp, Homo sapiens
  PCNA HH ribozyme binding site
tgaaccagttcaactaact

SEQ ID NO: 3972 - DNA, 19 bp, Homo sapiens
  PCNA HH ribozyme binding site
gaaccagttcaactaactt

SEQ ID NO: 3973 - DNA, 19 bp, Homo sapiens
  PCNA HH ribozyme binding site
agttcaactaacttttgca

SEQ ID NO: 3974 - DNA, 19 bp, Homo sapiens
  PCNA HH ribozyme binding site
caactaacttttgcactga

SEQ ID NO: 3975 - DNA, 19 bp, Homo sapiens
  PCNA HH ribozyme binding site
aactaacttttgcactgag

SEQ ID NO: 3976 - DNA, 19 bp, Homo sapiens
  PCNA HH ribozyme binding site
actaacttttgcactgagg

SEQ ID NO: 3977 - DNA, 19 bp, Homo sapiens
  PCNA HH ribozyme binding site
cactgaggtacctgaactt

SEQ ID NO: 3978 - DNA, 19 bp, Homo sapiens
  PCNA HH ribozyme binding site
acctgaacttctttacaaa

SEQ ID NO: 3979 - DNA, 19 bp, Homo sapiens
  PCNA HH ribozyme binding site
cctgaacttctttacaaaa

SEQ ID NO: 3980 - DNA, 19 bp, Homo sapiens
  PCNA HH ribozyme binding site
tgaacttctttacaaaagc

SEQ ID NO: 3981 - DNA, 19 bp, Homo sapiens
  PCNA HH ribozyme binding site
gaacttctttacaaaagcc

SEQ ID NO: 3982 - DNA, 19 bp, Homo sapiens
  PCNA HH ribozyme binding site
aacttctttacaaaagcca

SEQ ID NO: 3983 - DNA, 19 bp, Homo sapiens
  PCNA HH ribozyme binding site
aaagccactccactctctt

SEQ ID NO: 3984 - DNA, 19 bp, Homo sapiens
  PCNA HH ribozyme binding site
cactccactctcttcaacg

SEQ ID NO: 3985 - DNA, 19 bp, Homo sapiens
  PCNA HH ribozyme binding site
ctccactctcttcaacggt

SEQ ID NO: 3986 - DNA, 19 bp, Homo sapiens
  PCNA HH ribozyme binding site
ccactctcttcaacggtga

SEQ ID NO: 3987 - DNA, 19 bp, Homo sapiens
  PCNA HH ribozyme binding site
cactctcttcaacggtgac

SEQ ID NO: 3988 - DNA, 19 bp, Homo sapiens
  PCNA HH ribozyme binding site
ggtgacactcagtatgtct

SEQ ID NO: 3989 - DNA, 19 bp, Homo sapiens
  PCNA HH ribozyme binding site
acactcagtatgtctgcag

SEQ ID NO: 3990 - DNA, 19 bp, Homo sapiens
  PCNA HH ribozyme binding site
tcagtatgtctgcagatgt

SEQ ID NO: 3991 - DNA, 19 bp, Homo sapiens
  PCNA HH ribozyme binding site
tgcagatgtaccccttgtt

SEQ ID NO: 3992 - DNA, 19 bp, Homo sapiens
  PCNA HH ribozyme binding site
tgtaccccttgttgtagag

SEQ ID NO: 3993 - DNA, 19 bp, Homo sapiens
  PCNA HH ribozyme binding site
accccttgttgtagagtat

SEQ ID NO: 3994 - DNA, 19 bp, Homo sapiens
  PCNA HH ribozyme binding site
ccttgttgtagagtataaa

SEQ ID NO: 3995 - DNA, 19 bp, Homo sapiens
  PCNA HH ribozyme binding site
ttgtagagtataaaattgc

SEQ ID NO: 3996 - DNA, 19 bp, Homo sapiens
  PCNA HH ribozyme binding site
gtagagtataaaattgcgg

SEQ ID NO: 3997 - DNA, 19 bp, Homo sapiens
  PCNA HH ribozyme binding site
gtataaaattgcggatatg

SEQ ID NO: 3998 - DNA, 19 bp, Homo sapiens
  PCNA HH ribozyme binding site
attgcggatatgggacact

SEQ ID NO: 3999 - DNA, 19 bp, Homo sapiens
  PCNA HH ribozyme binding site
tgggacacttaaaatacta

SEQ ID NO: 4000 - DNA, 19 bp, Homo sapiens
  PCNA HH ribozyme binding site
gggacacttaaaatactac

SEQ ID NO: 4001 - DNA, 19 bp, Homo sapiens
  PCNA HH ribozyme binding site
acttaaaatactacttggc

SEQ ID NO: 4002 - DNA, 19 bp, Homo sapiens
  PCNA HH ribozyme binding site
taaaatactacttggctcc

SEQ ID NO: 4003 - DNA, 19 bp, Homo sapiens
  PCNA HH ribozyme binding site
aatactacttggctcccaa

SEQ ID NO: 4004 - DNA, 19 bp, Homo sapiens
  PCNA HH ribozyme binding site
tacttggctcccaagatcg

SEQ ID NO: 4005 - DNA, 19 bp, Homo sapiens
  PCNA HH ribozyme binding site
tcccaagatcgaggatgaa

SEQ ID NO: 4006 - DNA, 19 bp, Homo sapiens
  PCNA HH ribozyme binding site
aagaaggatcttaggcatt

SEQ ID NO: 4007 - DNA, 19 bp, Homo sapiens
  PCNA HH ribozyme binding site
gaaggatcttaggcattct

SEQ ID NO: 4008 - DNA, 19 bp, Homo sapiens
  PCNA HH ribozyme binding site
aaggatcttaggcattctt

SEQ ID NO: 4009 - DNA, 19 bp, Homo sapiens
  PCNA HH ribozyme binding site
cttaggcattcttaaaatt

SEQ ID NO: 4010 - DNA, 19 bp, Homo sapiens
  PCNA HH ribozyme binding site
ttaggcattcttaaaattc

SEQ ID NO: 4011 - DNA, 19 bp, Homo sapiens
  PCNA HH ribozyme binding site
aggcattcttaaaattcaa

SEQ ID NO: 4012 - DNA, 19 bp, Homo sapiens
  PCNA HH ribozyme binding site
ggcattcttaaaattcaag

SEQ ID NO: 4013 - DNA, 19 bp, Homo sapiens
  PCNA HH ribozyme binding site
tcttaaaattcaagaaaat

SEQ ID NO: 4014 - DNA, 19 bp, Homo sapiens
  PCNA HH ribozyme binding site
cttaaaattcaagaaaata

SEQ ID NO: 4015 - DNA, 19 bp, Homo sapiens
  PCNA HH ribozyme binding site
caagaaaataaaactaagc

SEQ ID NO: 4016 - DNA, 19 bp, Homo sapiens
  PCNA HH ribozyme binding site
aataaaactaagctctttg

SEQ ID NO: 4017 - DNA, 19 bp, Homo sapiens
  PCNA HH ribozyme binding site
aactaagctctttgagaac

SEQ ID NO: 4018 - DNA, 19 bp, Homo sapiens
  PCNA HH ribozyme binding site
ctaagctctttgagaactg

SEQ ID NO: 4019 - DNA, 19 bp, Homo sapiens
  PCNA HH ribozyme binding site
taagctctttgagaactgc

SEQ ID NO: 4020 - DNA, 19 bp, Homo sapiens
  PCNA HH ribozyme binding site
agaactgcttctaagatgc

SEQ ID NO: 4021 - DNA, 19 bp, Homo sapiens
  PCNA HH ribozyme binding site
gaactgcttctaagatgcc

SEQ ID NO: 4022 - DNA, 19 bp, Homo sapiens
  PCNA HH ribozyme binding site
actgcttctaagatgccag

SEQ ID NO: 4023 - DNA, 19 bp, Homo sapiens
  PCNA HH ribozyme binding site
tgccagcatatactgaagt

SEQ ID NO: 4024 - DNA, 19 bp, Homo sapiens
  PCNA HH ribozyme binding site
ccagcatatactgaagtct

SEQ ID NO: 4025 - DNA, 19 bp, Homo sapiens
  PCNA HH ribozyme binding site
tactgaagtcttttctgtc

SEQ ID NO: 4026 - DNA, 19 bp, Homo sapiens
  PCNA HH ribozyme binding site
ctgaagtcttttctgtcac

SEQ ID NO: 4027 - DNA, 19 bp, Homo sapiens
  PCNA HH ribozyme binding site
tgaagtcttttctgtcacc

SEQ ID NO: 4028 - DNA, 19 bp, Homo sapiens
  PCNA HH ribozyme binding site
gaagtcttttctgtcacca

SEQ ID NO: 4029 - DNA, 19 bp, Homo sapiens
  PCNA HH ribozyme binding site
aagtcttttctgtcaccaa

SEQ ID NO: 4030 - DNA, 19 bp, Homo sapiens
  PCNA HH ribozyme binding site
cttttctgtcaccaaattt

SEQ ID NO: 4031 - DNA, 19 bp, Homo sapiens
  PCNA HH ribozyme binding site
tcaccaaatttgtacctct

SEQ ID NO: 4032 - DNA, 19 bp, Homo sapiens
  PCNA HH ribozyme binding site
caccaaatttgtacctcta

SEQ ID NO: 4033 - DNA, 19 bp, Homo sapiens
  PCNA HH ribozyme binding site
caaatttgtacctctaagt

SEQ ID NO: 4034 - DNA, 19 bp, Homo sapiens
  PCNA HH ribozyme binding site
tttgtacctctaagtacat

SEQ ID NO: 4035 - DNA, 19 bp, Homo sapiens
  PCNA HH ribozyme binding site
tgtacctctaagtacatat

SEQ ID NO: 4036 - DNA, 19 bp, Homo sapiens
  PCNA HH ribozyme binding site
cctctaagtacatatgtag

SEQ ID NO: 4037 - DNA, 19 bp, Homo sapiens
  PCNA HH ribozyme binding site
taagtacatatgtagatat

SEQ ID NO: 4038 - DNA, 19 bp, Homo sapiens
  PCNA HH ribozyme binding site
tacatatgtagatattgtt

SEQ ID NO: 4039 - DNA, 19 bp, Homo sapiens
  PCNA HH ribozyme binding site
tatgtagatattgttttct

SEQ ID NO: 4040 - DNA, 19 bp, Homo sapiens
  PCNA HH ribozyme binding site
tgtagatattgttttctgt

SEQ ID NO: 4041 - DNA, 19 bp, Homo sapiens
  PCNA HH ribozyme binding site
agatattgttttctgtaaa

SEQ ID NO: 4042 - DNA, 19 bp, Homo sapiens
  PCNA HH ribozyme binding site
gatattgttttctgtaaat

SEQ ID NO: 4043 - DNA, 19 bp, Homo sapiens
  PCNA HH ribozyme binding site
atattgttttctgtaaata

SEQ ID NO: 4044 - DNA, 19 bp, Homo sapiens
  PCNA HH ribozyme binding site
tattgttttctgtaaataa

SEQ ID NO: 4045 - DNA, 19 bp, Homo sapiens
  PCNA HH ribozyme binding site
gttttctgtaaataaccta

SEQ ID NO: 4046 - DNA, 19 bp, Homo sapiens
  PCNA HH ribozyme binding site
tctgtaaataacctatttt

SEQ ID NO: 4047 - DNA, 19 bp, Homo sapiens
  PCNA HH ribozyme binding site
aaataacctattttttttc

SEQ ID NO: 4048 - DNA, 19 bp, Homo sapiens
  PCNA HH ribozyme binding site
ataacctattttttttctc

SEQ ID NO: 4049 - DNA, 19 bp, Homo sapiens
  PCNA HH ribozyme binding site
taacctattttttttctct

SEQ ID NO: 4050 - DNA, 19 bp, Homo sapiens
  PCNA HH ribozyme binding site
aacctattttttttctcta

SEQ ID NO: 4051 - DNA, 19 bp, Homo sapiens
  PCNA HH ribozyme binding site
acctattttttttctctat

SEQ ID NO: 4052 - DNA, 19 bp, Homo sapiens
  PCNA HH ribozyme binding site
cctattttttttctctatt

SEQ ID NO: 4053 - DNA, 19 bp, Homo sapiens
  PCNA HH ribozyme binding site
ctattttttttctctattc

SEQ ID NO: 4054 - DNA, 19 bp, Homo sapiens
  PCNA HH ribozyme binding site
tattttttttctctattct

SEQ ID NO: 4055 - DNA, 19 bp, Homo sapiens
  PCNA HH ribozyme binding site
attttttttctctattctc

SEQ ID NO: 4056 - DNA, 19 bp, Homo sapiens
  PCNA HH ribozyme binding site
tttttttctctattctctc

SEQ ID NO: 4057 - DNA, 19 bp, Homo sapiens
  PCNA HH ribozyme binding site
tttttctctattctctcca

SEQ ID NO: 4058 - DNA, 19 bp, Homo sapiens
  PCNA HH ribozyme binding site
tttctctattctctccaat

SEQ ID NO: 4059 - DNA, 19 bp, Homo sapiens
  PCNA HH ribozyme binding site
ttctctattctctccaatt

SEQ ID NO: 4060 - DNA, 19 bp, Homo sapiens
  PCNA HH ribozyme binding site
ctctattctctccaatttg

SEQ ID NO: 4061 - DNA, 19 bp, Homo sapiens
  PCNA HH ribozyme binding site
ctattctctccaatttgtt

SEQ ID NO: 4062 - DNA, 19 bp, Homo sapiens
  PCNA HH ribozyme binding site
ctctccaatttgtttaaag

SEQ ID NO: 4063 - DNA, 19 bp, Homo sapiens
  PCNA HH ribozyme binding site
tctccaatttgtttaaaga

SEQ ID NO: 4064 - DNA, 19 bp, Homo sapiens
  PCNA HH ribozyme binding site
ccaatttgtttaaagaata

SEQ ID NO: 4065 - DNA, 19 bp, Homo sapiens
  PCNA HH ribozyme binding site
caatttgtttaaagaataa

SEQ ID NO: 4066 - DNA, 19 bp, Homo sapiens
  PCNA HH ribozyme binding site
aatttgtttaaagaataaa

SEQ ID NO: 4067 - DNA, 19 bp, Homo sapiens
  PCNA HH ribozyme binding site
ttaaagaataaagtccaaa

SEQ ID NO: 4068 - DNA, 19 bp, Homo sapiens
  PCNA HH ribozyme binding site
gaataaagtccaaagtctg

SEQ ID NO: 4069 - DNA, 19 bp, Homo sapiens
  PCNA HH ribozyme binding site
gtccaaagtctgatctggt

SEQ ID NO: 4070 - DNA, 19 bp, Homo sapiens
  PCNA HH ribozyme binding site
aagtctgatctggtctagt

SEQ ID NO: 4071 - DNA, 19 bp, Homo sapiens
  PCNA HH ribozyme binding site
tgatctggtctagttaacc

SEQ ID NO: 4072 - DNA, 19 bp, Homo sapiens
  PCNA HH ribozyme binding site
atctggtctagttaaccta

SEQ ID NO: 4073 - DNA, 19 bp, Homo sapiens
  PCNA HH ribozyme binding site
tggtctagttaacctagaa

SEQ ID NO: 4074 - DNA, 19 bp, Homo sapiens
  PCNA HH ribozyme binding site
ggtctagttaacctagaag

SEQ ID NO: 4075 - DNA, 19 bp, Homo sapiens
  PCNA HH ribozyme binding site
agttaacctagaagtattt

SEQ ID NO: 4076 - DNA, 19 bp, Homo sapiens
  PCNA HH ribozyme binding site
cctagaagtatttttgtct

SEQ ID NO: 4077 - DNA, 19 bp, Homo sapiens
  PCNA HH ribozyme binding site
tagaagtatttttgtctct

SEQ ID NO: 4078 - DNA, 19 bp, Homo sapiens
  PCNA HH ribozyme binding site
agaagtatttttgtctctt

SEQ ID NO: 4079 - DNA, 19 bp, Homo sapiens
  PCNA HH ribozyme binding site
gaagtatttttgtctctta

SEQ ID NO: 4080 - DNA, 19 bp, Homo sapiens
  PCNA HH ribozyme binding site
aagtatttttgtctcttag

SEQ ID NO: 4081 - DNA, 19 bp, Homo sapiens
  PCNA HH ribozyme binding site
tatttttgtctcttagaaa

SEQ ID NO: 4082 - DNA, 19 bp, Homo sapiens
  PCNA HH ribozyme binding site
tttttgtctcttagaaata

SEQ ID NO: 4083 - DNA, 19 bp, Homo sapiens
  PCNA HH ribozyme binding site
tttgtctcttagaaatact

SEQ ID NO: 4084 - DNA, 19 bp, Homo sapiens
  PCNA HH ribozyme binding site
ttgtctcttagaaatactt

SEQ ID NO: 4085 - DNA, 19 bp, Homo sapiens
  PCNA HH ribozyme binding site
cttagaaatacttgtgatt

SEQ ID NO: 4086 - DNA, 19 bp, Homo sapiens
  PCNA HH ribozyme binding site
agaaatacttgtgattttt

SEQ ID NO: 4087 - DNA, 19 bp, Homo sapiens
  PCNA HH ribozyme binding site
acttgtgatttttataata

SEQ ID NO: 4088 - DNA, 19 bp, Homo sapiens
  PCNA HH ribozyme binding site
cttgtgatttttataatac

SEQ ID NO: 4089 - DNA, 19 bp, Homo sapiens
  PCNA HH ribozyme binding site
ttgtgatttttataataca

SEQ ID NO: 4090 - DNA, 19 bp, Homo sapiens
  PCNA HH ribozyme binding site
tgtgatttttataatacaa

SEQ ID NO: 4091 - DNA, 19 bp, Homo sapiens
  PCNA HH ribozyme binding site
gtgatttttataatacaaa

SEQ ID NO: 4092 - DNA, 19 bp, Homo sapiens
  PCNA HH ribozyme binding site
gatttttataatacaaaag

SEQ ID NO: 4093 - DNA, 19 bp, Homo sapiens
  PCNA HH ribozyme binding site
ttttataatacaaaagggt

SEQ ID NO: 4094 - DNA, 19 bp, Homo sapiens
  PCNA HH ribozyme binding site
caaaagggtcttgactcta

SEQ ID NO: 4095 - DNA, 19 bp, Homo sapiens
  PCNA HH ribozyme binding site
aaagggtcttgactctaaa

SEQ ID NO: 4096 - DNA, 19 bp, Homo sapiens
  PCNA HH ribozyme binding site
gtcttgactctaaatgcag

SEQ ID NO: 4097 - DNA, 19 bp, Homo sapiens
  PCNA HH ribozyme binding site
cttgactctaaatgcagtt

SEQ ID NO: 4098 - DNA, 19 bp, Homo sapiens
  PCNA HH ribozyme binding site
aaatgcagttttaagaagt

SEQ ID NO: 4099 - DNA, 19 bp, Homo sapiens
  PCNA HH ribozyme binding site
aatgcagttttaagaagtg

SEQ ID NO: 4100 - DNA, 19 bp, Homo sapiens
  PCNA HH ribozyme binding site
atgcagttttaagaagtgt

SEQ ID NO: 4101 - DNA, 19 bp, Homo sapiens
  PCNA HH ribozyme binding site
tgcagttttaagaagtgtt

SEQ ID NO: 4102 - DNA, 19 bp, Homo sapiens
  PCNA HH ribozyme binding site
aagaagtgtttttgaattt

SEQ ID NO: 4103 - DNA, 19 bp, Homo sapiens
  PCNA HH ribozyme binding site
agaagtgtttttgaattta

SEQ ID NO: 4104 - DNA, 19 bp, Homo sapiens
  PCNA HH ribozyme binding site
gaagtgtttttgaatttaa

SEQ ID NO: 4105 - DNA, 19 bp, Homo sapiens
  PCNA HH ribozyme binding site
aagtgtttttgaatttaaa

SEQ ID NO: 4106 - DNA, 19 bp, Homo sapiens
  PCNA HH ribozyme binding site
tttttgaatttaaataaag

SEQ ID NO: 4107 - DNA, 19 bp, Homo sapiens
  PCNA HH ribozyme binding site
ttttgaatttaaataaagt

SEQ ID NO: 4108 - DNA, 19 bp, Homo sapiens
  PCNA HH ribozyme binding site
tttgaatttaaataaagtt

SEQ ID NO: 4109 - DNA, 19 bp, Homo sapiens
  PCNA HH ribozyme binding site
aatttaaataaagttactt

SEQ ID NO: 4110 - DNA, 19 bp, Homo sapiens
  PCNA HH ribozyme binding site
aaataaagttacttgaatt

SEQ ID NO: 4111 - DNA, 19 bp, Homo sapiens
  PCNA HH ribozyme binding site
aataaagttacttgaattt

SEQ ID NO: 4112 - DNA, 19 bp, Homo sapiens
  PCNA HH ribozyme binding site
aaagttacttgaatttcaa

SEQ ID NO: 4113 - DNA, 19 bp, Homo sapiens
  PCNA HH ribozyme binding site
tacttgaatttcaaacaaa

SEQ ID NO: 4114 - DNA, 19 bp, Homo sapiens
  PCNA HH ribozyme binding site
acttgaatttcaaacaaaa

SEQ ID NO: 4115 - DNA, 19 bp, Homo sapiens
  PCNA HH ribozyme binding site
cttgaatttcaaacaaaaa

SEQ ID NO: 4116 - DNA, 52 bp, Homo sapiens
gacccctgagaaaggcaccagagaaacacacttggtggtatattacctggta

SEQ ID NO: 4117 - DNA, 52 bp, Homo sapiens
gagccctgagaaaggcaccagagaaacacacttggtggtatattacctggta

SEQ ID NO: 4118 - DNA, 52 bp, Homo sapiens
gagccctgagaaaggcaccagcgaaacacacttggtggcatattacctggta

SEQ ID NO: 4119 - DNA, 61 bp, Homo sapiens
gagccctgagaaaggcaccagcgaaacacacggacuucggtccgtggcatattacctggta

SEQ ID NO: 4120 - DNA, 14 bp, Homo sapiens
  modified_base (1): General Hairpin Ribozyme Site
  modified_base (2): Where n is a, c, g or u
  modified_base (3): Where n is a, c, g or u
  modified_base (5): Where n is a, c, g or u
  modified_base (9): Where n is a, c, g or u
  modified_base (10): Where n is a, c, g or u
  modified_base (11): Where n is a, c, g or u
  modified_base (12): Where n is a, c, g or u
  modified_base (13): Where n is a, c, g or u
  modified_base (14): Where n is a, c, g or u; Where n is a, c, g or u
nnnbngucnnnnnn

SEQ ID NO: 4121 - DNA, 15 bp, Homo sapiens
  modified_base (1): General Hairpin Ribozyme Site
  modified_base (2): Where n is a, c, g or u
  modified_base (3): Where n is a, c, g or u
  modified_base (5): Where n is a, c, g or u
  modified_base (9): Where n is a, c, g or u
  modified_base (10): Where n is a, c, g or u
  modified_base (11): Where n is a, c, g or u
  modified_base (12): Where n is a, c, g or u
  modified_base (13): Where n is a, c, g or u
  modified_base (14): Where n is a, c, g or u
  modified_base (15): Where n is a, c, g or u; Where n is a, c, g or u
nnnbngucnnnnnnn

SEQ ID NO: 4122 - DNA, 16 bp, Homo sapiens
  modified_base (1): General Hairpin Ribozyme Site
  modified_base (2): Where n is a, c, g or u
  modified_base (3): Where n is a, c, g or u
  modified_base (5): Where n is a, c, g or u
  modified_base (9): Where n is a, c, g or u
  modified_base (10): Where n is a, c, g or u
  modified_base (11): Where n is a, c, g or u
  modified_base (12): Where n is a, c, g or u
  modified_base (13): Where n is a, c, g or u
  modified_base (14): Where n is a, c, g or u
  modified_base (15): Where n is a, c, g or u
  modified_base (16): Where n is a, c, g or u; Where n is a, c, g or u
nnnbngucnnnnnnnn

SEQ ID NO: 4123 - DNA, 17 bp, Homo sapiens
  modified_base (1): General Hairpin Ribozyme Site
  modified_base (2): Where n is a, c, g or u
  modified_base (3): Where n is a, c, g or u
  modified_base (5): Where n is a, c, g or u
  modified_base (9): Where n is a, c, g or u
  modified_base (10): Where n is a, c, g or u
  modified_base (11): Where n is a, c, g or u
  modified_base (12): Where n is a, c, g or u
  modified_base (13): Where n is a, c, g or u
  modified_base (14): Where n is a, c, g or u
  modified_base (15): Where n is a, c, g or u
  modified_base (16): Where n is a, c, g or u
  modified_base (17): Where n is a, c, g or u; Where n is a, c, g or u
nnnbngucnnnnnnnnn

SEQ ID NO: 4124 - DNA, 18 bp, Homo sapiens
  General Hairpin Ribozyme Site
  modified_base (1): General Hairpin Ribozyme Site
  modified_base (2): Where n is a, c, g or u
  modified_base (3): Where n is a, c, g or u
  modified_base (5): Where n is a, c, g or u
  modified_base (9): Where n is a, c, g or u
  modified_base (10): Where n is a, c, g or u
  modified_base (11): Where n is a, c, g or u
  modified_base (12): Where n is a, c, g or u
  modified_base (13): Where n is a, c, g or u
  modified_base (14): Where n is a, c, g or u
  modified_base (15): Where n is a, c, g or u
  modified_base (16): Where n is a, c, g or u
  modified_base (17): Where n is a, c, g or u
  modified_base (18): Where n is a, c, g or u; Where n is a, c, g or u
nnnbngucnnnnnnnnnn

SEQ ID NO: 4125 - DNA, 16 bp, Homo sapiens
  Hairpin ribozyme recognition site for cdc 2 kinase
acttcgtcatccaaat

SEQ ID NO: 4126 - DNA, 16 bp, Homo sapiens
  Hairpin ribozyme recognition site for cdc 2 kinase
atatagtcagtcttca

SEQ ID NO: 4127 - DNA, 16 bp, Homo sapiens
  Hairpin ribozyme recognition site for cdc 2 kinase
agtcagtcttcaggat

SEQ ID NO: 4128 - DNA, 16 bp, Homo sapiens
  Hairpin ribozyme recognition site for cdc 2 kinase
tcctggtcagtacatg

SEQ ID NO: 4129 - DNA, 16 bp, Homo sapiens
  Hairpin ribozyme recognition site for cdc 2 kinase
gttttgtcactctaga

SEQ ID NO: 4130 - DNA, 16 bp, Homo sapiens
  Hairpin ribozyme recognition site for cdc 2 kinase
ctggggtcagctcgtt

SEQ ID NO: 4131 - DNA, 16 bp, Homo sapiens
  Hairpin ribozyme recognition site for cyclin B1
tccgagtcaccaggaa

SEQ ID NO: 4132 - DNA, 16 bp, Homo sapiens
  Hairpin ribozyme recognition site for cyclin B1
ccagtgtctgagccag

SEQ ID NO: 4133 - DNA, 16 bp, Homo sapiens
  Hairpin ribozyme recognition site for cyclin B1
cctgtgtcaggctttc

SEQ ID NO: 4134 - DNA, 16 bp, Homo sapiens
  Hairpin ribozyme recognition site for cyclin B1
aagcagtcagaccaaa

SEQ ID NO: 4135 - DNA, 16 bp, Homo sapiens
  Hairpin ribozyme recognition site for cyclin B1
actgggtcgggaagtc

SEQ ID NO: 4136 - DNA, 16 bp, Homo sapiens
  Hairpin ribozyme recognition site for cyclin B1
tgactgtctccattat

SEQ ID NO: 4137 - DNA, 16 bp, Homo sapiens
  Hairpin ribozyme recognition site for cyclin B1
ttggtgtcactgccat

SEQ ID NO: 4138 - DNA, 16 bp, Homo sapiens
  Hairpin ribozyme recognition site for cyclin B1
ctttggtctgggtcgg

SEQ ID NO: 4139 - DNA, 16 bp, Homo sapiens
  Hairpin ribozyme recognition site for cyclin B1
tctgggtcggcctcta

SEQ ID NO: 4140 - DNA, 16 bp, Homo sapiens
  Hairpin ribozyme recognition site for cyclin B1
tacctgtcatatactg

SEQ ID NO: 4141 - DNA, 16 bp, Homo sapiens
  Hairpin ribozyme recognition site for cyclin B1
atgtagtcatggtaaa

SEQ ID NO: 4142 - DNA, 16 bp, Homo sapiens
  Hairpin ribozyme recognition site for cyclin B1
tgactgtcaagaacaa

SEQ ID NO: 4143 - DNA, 16 bp, Homo sapiens
  Hairpin ribozyme recognition site for PCNA
gagtggtcgttgtctt

SEQ ID NO: 4144 - DNA, 16 bp, Homo sapiens
  Hairpin ribozyme recognition site for PCNA
tcgttgtctttctagg

SEQ ID NO: 4145 - DNA, 16 bp, Homo sapiens
  Hairpin ribozyme recognition site for PCNA
gcctggtccagggctc

SEQ ID NO: 4146 - DNA, 16 bp, Homo sapiens
  Hairpin ribozyme recognition site for PCNA
gactcgtcccacgtct

SEQ ID NO: 4147 - DNA, 16 bp, Homo sapiens
  Hairpin ribozyme recognition site for PCNA
ctgcggtctgagggct

SEQ ID NO: 4148 - DNA, 16 bp, Homo sapiens
  Hairpin ribozyme recognition site for PCNA
aaattgtcacagacaa

SEQ ID NO: 4149 - DNA, 16 bp, Homo sapiens
  Hairpin ribozyme recognition site for PCNA
tttctgtcaccaaatt

SEQ ID NO: 4150 - DNA, 16 bp, Homo sapiens
  Hairpin ribozyme recognition site for PCNA
atctggtctagttaac

SEQ ID NO: 4151 - DNA, 16 bp, Homo sapiens
  Hairpin ribozyme recognition site for PCNA
tttttgtctcttagaa

SEQ ID NO: 4152 - DNA, 16 bp, Homo sapiens
  Hairpin ribozyme recognition site for PCNA
aaagggtcttgactct

SEQ ID NO: 4153 - DNA, 16 bp, Homo sapiens
  Hairpin ribozyme recognition site for lysyl oxidase
ccgccgtccctggtgc

SEQ ID NO: 4154 - DNA, 16 bp, Homo sapiens
  Hairpin ribozyme recognition site for lysyl oxidase
ctggagtcaccgctgg

SEQ ID NO: 4155 - DNA, 16 bp, Homo sapiens
  Hairpin ribozyme recognition site for lysyl oxidase
cgcccgtcactggttc

SEQ ID NO: 4156 - DNA, 16 bp, Homo sapiens
  Hairpin ribozyme recognition site for lysyl oxidase
gtacggtctcccagac

SEQ ID NO: 4157 - DNA, 16 bp, Homo sapiens
  Hairpin ribozyme recognition site for lysyl oxidase
caggcgtccacgtacg

SEQ ID NO: 4158 - DNA, 16 bp, Homo sapiens
  Hairpin ribozyme recognition site for lysyl oxidase
aaactgtctggccagt

SEQ ID NO: 4159 - DNA, 16 bp, Homo sapiens
  Hairpin ribozyme recognition site for lysyl oxidase
tttctgtcttgaagac

SEQ ID NO: 4160 - DNA, 16 bp, Homo sapiens
  Hammerhead ribozyme recognition site for cdc 2 kinase
tacaggtcaagtggta

SEQ ID NO: 4161 - DNA, 17 bp, Homo sapiens
  Hammerhead ribozyme recognition site for cdc 2 kinase
aaatttctctattaaag

SEQ ID NO: 4162 - DNA, 16 bp, Homo sapiens
  Hammerhead ribozyme recognition site for cdc 2 kinase
agtcagtcttcaggat

SEQ ID NO: 4163 - DNA, 16 bp, Homo sapiens
  Hammerhead ribozyme recognition site for cdc 2 kinase
ctggggtcagctcgtt

SEQ ID NO: 4164 - DNA, 18 bp, Homo sapiens
  Hammerhead ribozyme recognition site for cdc 2 kinase
cgcggaataataagccgg

SEQ ID NO: 4165 - DNA, 18 bp, Homo sapiens
  Hammerhead ribozyme recognition site for cdc 2 kinase
ggaataataagccgggat

SEQ ID NO: 4166 - DNA, 18 bp, Homo sapiens
  Hammerhead ribozyme recognition site for cdc 2 kinase
gccgggatctaccatacc

SEQ ID NO: 4167 - DNA, 18 bp, Homo sapiens
  Hammerhead ribozyme recognition site for cdc 2 kinase
cgggatctaccataccat

SEQ ID NO: 4168 - DNA, 18 bp, Homo sapiens
  Hammerhead ribozyme recognition site for cdc 2 kinase
tctaccataccattgact

SEQ ID NO: 4169 - DNA, 18 bp, Homo sapiens
  Hammerhead ribozyme recognition site for cdc 2 kinase
cataccattgactaacta

SEQ ID NO: 4170 - DNA, 18 bp, Homo sapiens
  Hammerhead ribozyme recognition site for cdc 2 kinase
cattgactaactatggaa

SEQ ID NO: 4171 - DNA, 18 bp, Homo sapiens
  Hammerhead ribozyme recognition site for cdc 2 kinase
gactaactatggaagatt

SEQ ID NO: 4172 - DNA, 18 bp, Homo sapiens
  Hammerhead ribozyme recognition site for cdc 2 kinase
tggaagattataccaaaa

SEQ ID NO: 4173 - DNA, 18 bp, Homo sapiens
  Hammerhead ribozyme recognition site for cdc 2 kinase
ggaagattataccaaaat

SEQ ID NO: 4174 - DNA, 18 bp, Homo sapiens
  Hammerhead ribozyme recognition site for cdc 2 kinase
aagattataccaaaatag

SEQ ID NO: 4175 - DNA, 18 bp, Homo sapiens
  Hammerhead ribozyme recognition site for cdc 2 kinase
accaaaatagagaaaatt

SEQ ID NO: 4176 - DNA, 18 bp, Homo sapiens
  Hammerhead ribozyme recognition site for cdc 2 kinase
gagaaaattggagaaggt

SEQ ID NO: 4177 - DNA, 18 bp, Homo sapiens
  Hammerhead ribozyme recognition site for cdc 2 kinase
gagaaggtacctatggag

SEQ ID NO: 4178 - DNA, 19 bp, Homo sapiens
  Hammerhead ribozyme recognition site for cdc 2 kinase
aggtacctatggagttgtg

SEQ ID NO: 4179 - DNA, 18 bp, Homo sapiens
  Hammerhead ribozyme recognition site for cdc 2 kinase
tatggagttgtgtataag

SEQ ID NO: 4180 - DNA, 18 bp, Homo sapiens
  Hammerhead ribozyme recognition site for cdc 2 kinase
agttgtgtataagggtag

SEQ ID NO: 4181 - DNA, 18 bp, Homo sapiens
  Hammerhead ribozyme recognition site for cdc 2 kinase
ttgtgtataagggtagac

SEQ ID NO: 4182 - DNA, 18 bp, Homo sapiens
  Hammerhead ribozyme recognition site for cdc 2 kinase
ataagggtagacacaaaa

SEQ ID NO: 4183 - DNA, 18 bp, Homo sapiens
  Hammerhead ribozyme recognition site for cdc 2 kinase
acaaaactacaggtcaag

SEQ ID NO: 4184 - DNA, 18 bp, Homo sapiens
  Hammerhead ribozyme recognition site for cdc 2 kinase
ctacaggtcaagtggtag

SEQ ID NO: 4185 - DNA, 18 bp, Homo sapiens
  Hammerhead ribozyme recognition site for cdc 2 kinase
caagtggtagccatgaaa

SEQ ID NO: 4186 - DNA, 18 bp, Homo sapiens
  Hammerhead ribozyme recognition site for cdc 2 kinase
aaaaaaatcagactagaa

SEQ ID NO: 4187 - DNA, 18 bp, Homo sapiens
  Hammerhead ribozyme recognition site for cdc 2 kinase
atcagactagaaagtgaa

SEQ ID NO: 4188 - DNA, 18 bp, Homo sapiens
  Hammerhead ribozyme recognition site for cdc 2 kinase
gaaggggttcctagtact

SEQ ID NO: 4189 - DNA, 18 bp, Homo sapiens
  Hammerhead ribozyme recognition site for cdc 2 kinase
aaggggttcctagtactg

SEQ ID NO: 4190 - DNA, 18 bp, Homo sapiens
  Hammerhead ribozyme recognition site for cdc 2 kinase
gggttcctagtactgcaa

SEQ ID NO: 4191 - DNA, 18 bp, Homo sapiens
  Hammerhead ribozyme recognition site for cdc 2 kinase
ttcctagtactgcaattc

SEQ ID NO: 4192 - DNA, 18 bp, Homo sapiens
  Hammerhead ribozyme recognition site for cdc 2 kinase
actgcaattcgggaaatt

SEQ ID NO: 4193 - DNA, 18 bp, Homo sapiens
  Hammerhead ribozyme recognition site for cdc 2 kinase
ctgcaattcgggaaattt

SEQ ID NO: 4194 - DNA, 18 bp, Homo sapiens
  Hammerhead ribozyme recognition site for cdc 2 kinase
cgggaaatttctctatta

SEQ ID NO: 4195 - DNA, 18 bp, Homo sapiens
  Hammerhead ribozyme recognition site for cdc 2 kinase
gggaaatttctctattaa

SEQ ID NO: 4196 - DNA, 18 bp, Homo sapiens
  Hammerhead ribozyme recognition site for cdc 2 kinase
ggaaatttctctattaaa

SEQ ID NO: 4197 - DNA, 18 bp, Homo sapiens
  Hammerhead ribozyme recognition site for cdc 2 kinase
aaatttctctattaaagg

SEQ ID NO: 4198 - DNA, 18 bp, Homo sapiens
  Hammerhead ribozyme recognition site for cdc 2 kinase
atttctctattaaaggaa

SEQ ID NO: 4199 - DNA, 18 bp, Homo sapiens
  Hammerhead ribozyme recognition site for cdc 2 kinase
ttctctattaaaggaact

SEQ ID NO: 4200 - DNA, 18 bp, Homo sapiens
  Hammerhead ribozyme recognition site for cdc 2 kinase
tctctattaaaggaactt

SEQ ID NO: 4201 - DNA, 18 bp, Homo sapiens
  Hammerhead ribozyme recognition site for cdc 2 kinase
aaggaacttcgtcatcca

SEQ ID NO: 4202 - DNA, 18 bp, Homo sapiens
  Hammerhead ribozyme recognition site for cdc 2 kinase
aggaacttcgtcatccaa

SEQ ID NO: 4203 - DNA, 18 bp, Homo sapiens
  Hammerhead ribozyme recognition site for cdc 2 kinase
aacttcgtcatccaaata

SEQ ID NO: 4204 - DNA, 18 bp, Homo sapiens
  Hammerhead ribozyme recognition site for cdc 2 kinase
ttcgtcatccaaatatag

SEQ ID NO: 4205 - DNA, 18 bp, Homo sapiens
  Hammerhead ribozyme recognition site for cdc 2 kinase
atccaaatatagtcagtc

SEQ ID NO: 4206 - DNA, 18 bp, Homo sapiens
  Hammerhead ribozyme recognition site for cdc 2 kinase
ccaaatatagtcagtctt

SEQ ID NO: 4207 - DNA, 18 bp, Homo sapiens
  Hammerhead ribozyme recognition site for cdc 2 kinase
aatatagtcagtcttcag

SEQ ID NO: 4208 - DNA, 18 bp, Homo sapiens
  Hammerhead ribozyme recognition site for cdc 2 kinase
tagtcagtcttcaggatg

SEQ ID NO: 4209 - DNA, 18 bp, Homo sapiens
  Hammerhead ribozyme recognition site for cdc 2 kinase
gtcagtcttcaggatgtg

SEQ ID NO: 4210 - DNA, 18 bp, Homo sapiens
  Hammerhead ribozyme recognition site for cdc 2 kinase
tcagtcttcaggatgtgc

SEQ ID NO: 4211 - DNA, 19 bp, Homo sapiens
  Hammerhead ribozyme recognition site for cdc 2 kinase
gatgtgcttatgcaggatt

SEQ ID NO: 4212 - DNA, 19 bp, Homo sapiens
  Hammerhead ribozyme recognition site for cdc 2 kinase
atgtgcttatgcaggattc

SEQ ID NO: 4213 - DNA, 18 bp, Homo sapiens
  Hammerhead ribozyme recognition site for cdc 2 kinase
tgcaggattccaggttat

SEQ ID NO: 4214 - DNA, 18 bp, Homo sapiens
  Hammerhead ribozyme recognition site for cdc 2 kinase
gcaggattccaggttata

SEQ ID NO: 4215 - DNA, 18 bp, Homo sapiens
  Hammerhead ribozyme recognition site for cdc 2 kinase
ttccaggttatatctcat

SEQ ID NO: 4216 - DNA, 18 bp, Homo sapiens
  Hammerhead ribozyme recognition site for cdc 2 kinase
tccaggttatatctcatc

SEQ ID NO: 4217 - DNA, 18 bp, Homo sapiens
  Hammerhead ribozyme recognition site for cdc 2 kinase
caggttatatctcatctt

SEQ ID NO: 4218 - DNA, 18 bp, Homo sapiens
  Hammerhead ribozyme recognition site for cdc 2 kinase
ggttatatctcatctttg

SEQ ID NO: 4219 - DNA, 18 bp, Homo sapiens
  Hammerhead ribozyme recognition site for cdc 2 kinase
ttatatctcatctttgag

SEQ ID NO: 4220 - DNA, 18 bp, Homo sapiens
  Hammerhead ribozyme recognition site for cdc 2 kinase
tatctcatctttgagttt

SEQ ID NO: 4221 - DNA, 18 bp, Homo sapiens
  Hammerhead ribozyme recognition site for cdc 2 kinase
tctcatctttgagtttct

SEQ ID NO: 4222 - DNA, 18 bp, Homo sapiens
  Hammerhead ribozyme recognition site for cdc 2 kinase
ctcatctttgagtttctt

SEQ ID NO: 4223 - DNA, 18 bp, Homo sapiens
  Hammerhead ribozyme recognition site for cdc 2 kinase
ctttgagtttctttccat

SEQ ID NO: 4224 - DNA, 18 bp, Homo sapiens
  Hammerhead ribozyme recognition site for cdc 2 kinase
tttgagtttctttccatg

SEQ ID NO: 4225 - DNA, 18 bp, Homo sapiens
  Hammerhead ribozyme recognition site for cdc 2 kinase
ttgagtttctttccatgg

SEQ ID NO: 4226 - DNA, 18 bp, Homo sapiens
  Hammerhead ribozyme recognition site for cdc 2 kinase
gagtttctttccatggat

SEQ ID NO: 4227 - DNA, 18 bp, Homo sapiens
  Hammerhead ribozyme recognition site for cdc 2 kinase
agtttctttccatggatc

SEQ ID NO: 4228 - DNA, 18 bp, Homo sapiens
  Hammerhead ribozyme recognition site for cdc 2 kinase
ccatggatctgaagaaat

SEQ ID NO: 4229 - DNA, 18 bp, Homo sapiens
  Hammerhead ribozyme recognition site for cdc 2 kinase
gaagaaatacttggattc

SEQ ID NO: 4230 - DNA, 18 bp, Homo sapiens
  Hammerhead ribozyme recognition site for cdc 2 kinase
gaaatacttggattctat

SEQ ID NO: 4231 - DNA, 18 bp, Homo sapiens
  Hammerhead ribozyme recognition site for cdc 2 kinase
acttggattctatccctc

SEQ ID NO: 4232 - DNA, 18 bp, Homo sapiens
  Hammerhead ribozyme recognition site for cdc 2 kinase
cttggattctatccctcc

SEQ ID NO: 4233 - DNA, 18 bp, Homo sapiens
  Hammerhead ribozyme recognition site for cdc 2 kinase
tggattctatccctcctg

SEQ ID NO: 4234 - DNA, 18 bp, Homo sapiens
  Hammerhead ribozyme recognition site for cdc 2 kinase
gattctatccctcctggt

SEQ ID NO: 4235 - DNA, 18 bp, Homo sapiens
  Hammerhead ribozyme recognition site for cdc 2 kinase
ctatccctcctggtcagt

SEQ ID NO: 4236 - DNA, 18 bp, Homo sapiens
  Hammerhead ribozyme recognition site for cdc 2 kinase
ctcctggtcagtacatgg

SEQ ID NO: 4237 - DNA, 18 bp, Homo sapiens
  Hammerhead ribozyme recognition site for cdc 2 kinase
tggtcagtacatggattc

SEQ ID NO: 4238 - DNA, 18 bp, Homo sapiens
  Hammerhead ribozyme recognition site for cdc 2 kinase
acatggattcttcacttg

SEQ ID NO: 4239 - DNA, 18 bp, Homo sapiens
  Hammerhead ribozyme recognition site for cdc 2 kinase
catggattcttcacttgt

SEQ ID NO: 4240 - DNA, 18 bp, Homo sapiens
  Hammerhead ribozyme recognition site for cdc 2 kinase
tggattcttcacttgtta

SEQ ID NO: 4241 - DNA, 18 bp, Homo sapiens
  Hammerhead ribozyme recognition site for cdc 2 kinase
ggattcttcacttgttaa

SEQ ID NO: 4242 - DNA, 18 bp, Homo sapiens
  Hammerhead ribozyme recognition site for cdc 2 kinase
tcttcacttgttaagagt

SEQ ID NO: 4243 - DNA, 18 bp, Homo sapiens
  Hammerhead ribozyme recognition site for cdc 2 kinase
tcacttgttaagagttat

SEQ ID NO: 4244 - DNA, 18 bp, Homo sapiens
  Hammerhead ribozyme recognition site for cdc 2 kinase
cacttgttaagagttatt

SEQ ID NO: 4245 - DNA, 18 bp, Homo sapiens
  Hammerhead ribozyme recognition site for cdc 2 kinase
ttaagagttatttatacc

SEQ ID NO: 4246 - DNA, 18 bp, Homo sapiens
  Hammerhead ribozyme recognition site for cdc 2 kinase
taagagttatttatacca

SEQ ID NO: 4247 - DNA, 18 bp, Homo sapiens
  Hammerhead ribozyme recognition site for cdc 2 kinase
agagttatttataccaaa

SEQ ID NO: 4248 - DNA, 18 bp, Homo sapiens
  Hammerhead ribozyme recognition site for cdc 2 kinase
gagttatttataccaaat

SEQ ID NO: 4249 - DNA, 18 bp, Homo sapiens
  Hammerhead ribozyme recognition site for cdc 2 kinase
agttatttataccaaatc

SEQ ID NO: 4250 - DNA, 18 bp, Homo sapiens
  Hammerhead ribozyme recognition site for cdc 2 kinase
ttatttataccaaatcct

SEQ ID NO: 4251 - DNA, 18 bp, Homo sapiens
  Hammerhead ribozyme recognition site for cdc 2 kinase
caaatcctacaggggatt

SEQ ID NO: 4252 - DNA, 18 bp, Homo sapiens
  Hammerhead ribozyme recognition site for cdc 2 kinase
caggggattgtgttttgt

SEQ ID NO: 4253 - DNA, 18 bp, Homo sapiens
  Hammerhead ribozyme recognition site for cdc 2 kinase
gattgtgttttgtcactc

SEQ ID NO: 4254 - DNA, 18 bp, Homo sapiens
  Hammerhead ribozyme recognition site for cdc 2 kinase
attgtgttttgtcactct

SEQ ID NO: 4255 - DNA, 18 bp, Homo sapiens
  Hammerhead ribozyme recognition site for cdc 2 kinase
ttgtgttttgtcactcta

SEQ ID NO: 4256 - DNA, 18 bp, Homo sapiens
  Hammerhead ribozyme recognition site for cdc 2 kinase
tgttttgtcactctagaa

SEQ ID NO: 4257 - DNA, 18 bp, Homo sapiens
  Hammerhead ribozyme recognition site for cdc 2 kinase
ttgtcactctagaagagt

SEQ ID NO: 4258 - DNA, 18 bp, Homo sapiens
  Hammerhead ribozyme recognition site for cdc 2 kinase
gtcactctagaagagttc

SEQ ID NO: 4259 - DNA, 18 bp, Homo sapiens
  Hammerhead ribozyme recognition site for cdc 2 kinase
agaagagttcttcacaga

SEQ ID NO: 4260 - DNA, 18 bp, Homo sapiens
  Hammerhead ribozyme recognition site for cdc 2 kinase
gaagagttcttcacagag

SEQ ID NO: 4261 - DNA, 18 bp, Homo sapiens
  Hammerhead ribozyme recognition site for cdc 2 kinase
agagttcttcacagagac

SEQ ID NO: 4262 - DNA, 18 bp, Homo sapiens
  Hammerhead ribozyme recognition site for cdc 2 kinase
cagagacttaaaacctca

SEQ ID NO: 4263 - DNA, 18 bp, Homo sapiens
  Hammerhead ribozyme recognition site for cdc 2 kinase
agagacttaaaacctcaa

SEQ ID NO: 4264 - DNA, 18 bp, Homo sapiens
  Hammerhead ribozyme recognition site for cdc 2 kinase
taaaacctcaaaatctct

SEQ ID NO: 4265 - DNA, 18 bp, Homo sapiens
  Hammerhead ribozyme recognition site for cdc 2 kinase
ctcaaaatctcttgattg

SEQ ID NO: 4266 - DNA, 18 bp, Homo sapiens
  Hammerhead ribozyme recognition site for cdc 2 kinase
caaaatctcttgattgat

SEQ ID NO: 4267 - DNA, 18 bp, Homo sapiens
  Hammerhead ribozyme recognition site for cdc 2 kinase
aaatctcttgattgatga

SEQ ID NO: 4268 - DNA, 18 bp, Homo sapiens
  Hammerhead ribozyme recognition site for cdc 2 kinase
ctcttgattgatgacaaa

SEQ ID NO: 4269 - DNA, 18 bp, Homo sapiens
  Hammerhead ribozyme recognition site for cdc 2 kinase
ggaacaattaaactggct

SEQ ID NO: 4270 - DNA, 18 bp, Homo sapiens
  Hammerhead ribozyme recognition site for cdc 2 kinase
tggctgattttggccttg

SEQ ID NO: 4271 - DNA, 18 bp, Homo sapiens
  Hammerhead ribozyme recognition site for cdc 2 kinase
ggctgattttggccttgc

SEQ ID NO: 4272 - DNA, 18 bp, Homo sapiens
  Hammerhead ribozyme recognition site for cdc 2 kinase
gctgattttggccttgcc

SEQ ID NO: 4273 - DNA, 18 bp, Homo sapiens
  Hammerhead ribozyme recognition site for cdc 2 kinase
tttggccttgccagagct

SEQ ID NO: 4274 - DNA, 18 bp, Homo sapiens
  Hammerhead ribozyme recognition site for cdc 2 kinase
ccagagcttttggaatac

SEQ ID NO: 4275 - DNA, 18 bp, Homo sapiens
  Hammerhead ribozyme recognition site for cdc 2 kinase
cagagcttttggaatacc

SEQ ID NO: 4276 - DNA, 18 bp, Homo sapiens
  Hammerhead ribozyme recognition site for cdc 2 kinase
agagcttttggaatacct

SEQ ID NO: 4277 - DNA, 18 bp, Homo sapiens
  Hammerhead ribozyme recognition site for cdc 2 kinase
tttggaatacctatcaga

SEQ ID NO: 4278 - DNA, 18 bp, Homo sapiens
  Hammerhead ribozyme recognition site for cdc 2 kinase
gaatacctatcagagtat

SEQ ID NO: 4279 - DNA, 18 bp, Homo sapiens
  Hammerhead ribozyme recognition site for cdc 2 kinase
atacctatcagagtatat

SEQ ID NO: 4280 - DNA, 18 bp, Homo sapiens
  Hammerhead ribozyme recognition site for cdc 2 kinase
atcagagtatatacacat

SEQ ID NO: 4281 - DNA, 18 bp, Homo sapiens
  Hammerhead ribozyme recognition site for cdc 2 kinase
cagagtatatacacatga

SEQ ID NO: 4282 - DNA, 18 bp, Homo sapiens
  Hammerhead ribozyme recognition site for cdc 2 kinase
gagtatatacacatgagg

SEQ ID NO: 4283 - DNA, 18 bp, Homo sapiens
  Hammerhead ribozyme recognition site for cdc 2 kinase
catgaggtagtaacactc

SEQ ID NO: 4284 - DNA, 18 bp, Homo sapiens
  Hammerhead ribozyme recognition site for cdc 2 kinase
gaggtagtaacactctgg

SEQ ID NO: 4285 - DNA, 18 bp, Homo sapiens
  Hammerhead ribozyme recognition site for cdc 2 kinase
actctggtacagatctcc

SEQ ID NO: 4286 - DNA, 18 bp, Homo sapiens
  Hammerhead ribozyme recognition site for cdc 2 kinase
gtacagatctccagaagt

SEQ ID NO: 4287 - DNA, 18 bp, Homo sapiens
  Hammerhead ribozyme recognition site for cdc 2 kinase
acagatctccagaagtat

SEQ ID NO: 4288 - DNA, 18 bp, Homo sapiens
  Hammerhead ribozyme recognition site for cdc 2 kinase
ccagaagtattgctgggg

SEQ ID NO: 4289 - DNA, 18 bp, Homo sapiens
  Hammerhead ribozyme recognition site for cdc 2 kinase
agaagtattgctggggtc

SEQ ID NO: 4290 - DNA, 18 bp, Homo sapiens
  Hammerhead ribozyme recognition site for cdc 2 kinase
gctggggtcagctcgtta

SEQ ID NO: 4291 - DNA, 18 bp, Homo sapiens
  Hammerhead ribozyme recognition site for cdc 2 kinase
ggtcagctcgttactcaa

SEQ ID NO: 4292 - DNA, 18 bp, Homo sapiens
  Hammerhead ribozyme recognition site for cdc 2 kinase
cagctcgttactcaactc

SEQ ID NO: 4293 - DNA, 18 bp, Homo sapiens
  Hammerhead ribozyme recognition site for cdc 2 kinase
agctcgttactcaactcc

SEQ ID NO: 4294 - DNA, 18 bp, Homo sapiens
  Hammerhead ribozyme recognition site for cdc 2 kinase
tcgttactcaactccagt

SEQ ID NO: 4295 - DNA, 18 bp, Homo sapiens
  Hammerhead ribozyme recognition site for cdc 2 kinase
actcaactccagttgaca

SEQ ID NO: 4296 - DNA, 18 bp, Homo sapiens
  Hammerhead ribozyme recognition site for cdc 2 kinase
actccagttgacatttgg

SEQ ID NO: 4297 - DNA, 18 bp, Homo sapiens
  Hammerhead ribozyme recognition site for cdc 2 kinase
gttgacatttggagtata

SEQ ID NO: 4298 - DNA, 18 bp, Homo sapiens
  Hammerhead ribozyme recognition site for cdc 2 kinase
ttgacatttggagtatag

SEQ ID NO: 4299 - DNA, 18 bp, Homo sapiens
  Hammerhead ribozyme recognition site for cdc 2 kinase
tttggagtataggcacca

SEQ ID NO: 4300 - DNA, 18 bp, Homo sapiens
  Hammerhead ribozyme recognition site for cdc 2 kinase
tggagtataggcaccata

SEQ ID NO: 4301 - DNA, 18 bp, Homo sapiens
  Hammerhead ribozyme recognition site for cdc 2 kinase
ggcaccatatttgctgaa

SEQ ID NO: 4302 - DNA, 18 bp, Homo sapiens
  Hammerhead ribozyme recognition site for cdc 2 kinase
caccatatttgctgaact

SEQ ID NO: 4303 - DNA, 18 bp, Homo sapiens
  Hammerhead ribozyme recognition site for cdc 2 kinase
accatatttgctgaacta

SEQ ID NO: 4304 - DNA, 18 bp, Homo sapiens
  Hammerhead ribozyme recognition site for cdc 2 kinase
gctgaactagcaactaag

SEQ ID NO: 4305 - DNA, 18 bp, Homo sapiens
  Hammerhead ribozyme recognition site for cdc 2 kinase
tagcaactaagaaaccat

SEQ ID NO: 4306 - DNA, 18 bp, Homo sapiens
  Hammerhead ribozyme recognition site for cdc 2 kinase
gaaaccattttccatggg

SEQ ID NO: 4307 - DNA, 18 bp, Homo sapiens
  Hammerhead ribozyme recognition site for cdc 2 kinase
aaaccattttccatgggg

SEQ ID NO: 4308 - DNA, 18 bp, Homo sapiens
  Hammerhead ribozyme recognition site for cdc 2 kinase
aaccattttccatgggga

SEQ ID NO: 4309 - DNA, 18 bp, Homo sapiens
  Hammerhead ribozyme recognition site for cdc 2 kinase
accattttccatggggat

SEQ ID NO: 4310 - DNA, 18 bp, Homo sapiens
  Hammerhead ribozyme recognition site for cdc 2 kinase
atggggattcagaaattg

SEQ ID NO: 4311 - DNA, 18 bp, Homo sapiens
  Hammerhead ribozyme recognition site for cdc 2 kinase
tggggattcagaaattga

SEQ ID NO: 4312 - DNA, 18 bp, Homo sapiens
  Hammerhead ribozyme recognition site for cdc 2 kinase
aaattgatcaactcttca

SEQ ID NO: 4313 - DNA, 18 bp, Homo sapiens
  Hammerhead ribozyme recognition site for cdc 2 kinase
gatcaactcttcaggatt

SEQ ID NO: 4314 - DNA, 18 bp, Homo sapiens
  Hammerhead ribozyme recognition site for cdc 2 kinase
tcaactcttcaggatttt

SEQ ID NO: 4315 - DNA, 18 bp, Homo sapiens
  Hammerhead ribozyme recognition site for cdc 2 kinase
ttcaggattttcagagct

SEQ ID NO: 4316 - DNA, 18 bp, Homo sapiens
  Hammerhead ribozyme recognition site for cdc 2 kinase
tcaggattttcagagctt

SEQ ID NO: 4317 - DNA, 18 bp, Homo sapiens
  Hammerhead ribozyme recognition site for cdc 2 kinase
caggattttcagagcttt

SEQ ID NO: 4318 - DNA, 18 bp, Homo sapiens
  Hammerhead ribozyme recognition site for cdc 2 kinase
aggattttcagagctttg

SEQ ID NO: 4319 - DNA, 18 bp, Homo sapiens
  Hammerhead ribozyme recognition site for cdc 2 kinase
tcagagctttgggcactc

SEQ ID NO: 4320 - DNA, 18 bp, Homo sapiens
  Hammerhead ribozyme recognition site for cdc 2 kinase
cagagctttgggcactcc

SEQ ID NO: 4321 - DNA, 18 bp, Homo sapiens
  Hammerhead ribozyme recognition site for cdc 2 kinase
tgggcactcccaataatg

SEQ ID NO: 4322 - DNA, 18 bp, Homo sapiens
  Hammerhead ribozyme recognition site for cdc 2 kinase
ctcccaataatgaagtgt

SEQ ID NO: 4323 - DNA, 18 bp, Homo sapiens
  Hammerhead ribozyme recognition site for cdc 2 kinase
agtggaatctttacagga

SEQ ID NO: 4324 - DNA, 18 bp, Homo sapiens
  Hammerhead ribozyme recognition site for cdc 2 kinase
tggaatctttacaggact

SEQ ID NO: 4325 - DNA, 18 bp, Homo sapiens
  Hammerhead ribozyme recognition site for cdc 2 kinase
ggaatctttacaggacta

SEQ ID NO: 4326 - DNA, 18 bp, Homo sapiens
  Hammerhead ribozyme recognition site for cdc 2 kinase
gaatctttacaggactat

SEQ ID NO: 4327 - DNA, 18 bp, Homo sapiens
  Hammerhead ribozyme recognition site for cdc 2 kinase
acaggactataagaatac

SEQ ID NO: 4328 - DNA, 18 bp, Homo sapiens
  Hammerhead ribozyme recognition site for cdc 2 kinase
aggactataagaatacat

SEQ ID NO: 4329 - DNA, 18 bp, Homo sapiens
  Hammerhead ribozyme recognition site for cdc 2 kinase
ataagaatacatttccca

SEQ ID NO: 4330 - DNA, 18 bp, Homo sapiens
  Hammerhead ribozyme recognition site for cdc 2 kinase
gaatacatttcccaaatg

SEQ ID NO: 4331 - DNA, 18 bp, Homo sapiens
  Hammerhead ribozyme recognition site for cdc 2 kinase
aatacatttcccaaatgg

SEQ ID NO: 4332 - DNA, 18 bp, Homo sapiens
  Hammerhead ribozyme recognition site for cdc 2 kinase
atacatttcccaaatgga

SEQ ID NO: 4333 - DNA, 18 bp, Homo sapiens
  Hammerhead ribozyme recognition site for cdc 2 kinase
ggaagcctagcatcccat

SEQ ID NO: 4334 - DNA, 18 bp, Homo sapiens
  Hammerhead ribozyme recognition site for cdc 2 kinase
cctagcatcccatgtcaa

SEQ ID NO: 4335 - DNA, 18 bp, Homo sapiens
  Hammerhead ribozyme recognition site for cdc 2 kinase
tcccatgtcaaaaacttg

SEQ ID NO: 4336 - DNA, 18 bp, Homo sapiens
  Hammerhead ribozyme recognition site for cdc 2 kinase
caaaaacttggatgaaaa

SEQ ID NO: 4337 - DNA, 18 bp, Homo sapiens
  Hammerhead ribozyme recognition site for cdc 2 kinase
aaatggcttggatttgct

SEQ ID NO: 4338 - DNA, 18 bp, Homo sapiens
  Hammerhead ribozyme recognition site for cdc 2 kinase
gcttggatttgctctcga

SEQ ID NO: 4339 - DNA, 18 bp, Homo sapiens
  Hammerhead ribozyme recognition site for cdc 2 kinase
cttggatttgctctcgaa

SEQ ID NO: 4340 - DNA, 18 bp, Homo sapiens
  Hammerhead ribozyme recognition site for cdc 2 kinase
gatttgctctcgaaaatg

SEQ ID NO: 4341 - DNA, 18 bp, Homo sapiens
  Hammerhead ribozyme recognition site for cdc 2 kinase
tttgctctcgaaaatgtt

SEQ ID NO: 4342 - DNA, 18 bp, Homo sapiens
  Hammerhead ribozyme recognition site for cdc 2 kinase
gaaaatgttaatctatga

SEQ ID NO: 4343 - DNA, 18 bp, Homo sapiens
  Hammerhead ribozyme recognition site for cdc 2 kinase
aaaatgttaatctatgat

SEQ ID NO: 4344 - DNA, 18 bp, Homo sapiens
  Hammerhead ribozyme recognition site for cdc 2 kinase
atgttaatctatgatcca

SEQ ID NO: 4345 - DNA, 18 bp, Homo sapiens
  Hammerhead ribozyme recognition site for cdc 2 kinase
gttaatctatgatccagc

SEQ ID NO: 4346 - DNA, 18 bp, Homo sapiens
  Hammerhead ribozyme recognition site for cdc 2 kinase
tctatgatccagccaaac

SEQ ID NO: 4347 - DNA, 18 bp, Homo sapiens
  Hammerhead ribozyme recognition site for cdc 2 kinase
aaacgaatttctggcaaa

SEQ ID NO: 4348 - DNA, 18 bp, Homo sapiens
  Hammerhead ribozyme recognition site for cdc 2 kinase
aacgaatttctggcaaaa

SEQ ID NO: 4349 - DNA, 18 bp, Homo sapiens
  Hammerhead ribozyme recognition site for cdc 2 kinase
acgaatttctggcaaaat

SEQ ID NO: 4350 - DNA, 18 bp, Homo sapiens
  Hammerhead ribozyme recognition site for cdc 2 kinase
cactgaatcatccatatt

SEQ ID NO: 4351 - DNA, 18 bp, Homo sapiens
  Hammerhead ribozyme recognition site for cdc 2 kinase
tgaatcatccatatttta

SEQ ID NO: 4352 - DNA, 18 bp, Homo sapiens
  Hammerhead ribozyme recognition site for cdc 2 kinase
tcatccatattttaatga

SEQ ID NO: 4353 - DNA, 18 bp, Homo sapiens
  Hammerhead ribozyme recognition site for cdc 2 kinase
atccatattttaatgatt

SEQ ID NO: 4354 - DNA, 18 bp, Homo sapiens
  Hammerhead ribozyme recognition site for cdc 2 kinase
tccatattttaatgattt

SEQ ID NO: 4355 - DNA, 18 bp, Homo sapiens
  Hammerhead ribozyme recognition site for cdc 2 kinase
ccatattttaatgatttg

SEQ ID NO: 4356 - DNA, 18 bp, Homo sapiens
  Hammerhead ribozyme recognition site for cdc 2 kinase
catattttaatgatttgg

SEQ ID NO: 4357 - DNA, 18 bp, Homo sapiens
  Hammerhead ribozyme recognition site for cdc 2 kinase
ttaatgatttggacaatc

SEQ ID NO: 4358 - DNA, 18 bp, Homo sapiens
  Hammerhead ribozyme recognition site for cdc 2 kinase
taatgatttggacaatca

SEQ ID NO: 4359 - DNA, 18 bp, Homo sapiens
  Hammerhead ribozyme recognition site for cdc 2 kinase
tggacaatcagattaaga

SEQ ID NO: 4360 - DNA, 18 bp, Homo sapiens
  Hammerhead ribozyme recognition site for cdc 2 kinase
gaagatgtagctttctga

SEQ ID NO: 4361 - DNA, 16 bp, Homo sapiens
  Hammerhead ribozyme recognition site for cyclin B1
tccgagtcaccaggaa

SEQ ID NO: 4362 - DNA, 16 bp, Homo sapiens
  Hammerhead ribozyme recognition site for cyclin B1
ccagtgtctgagccag

SEQ ID NO: 4363 - DNA, 16 bp, Homo sapiens
  Hammerhead ribozyme recognition site for cyclin B1
cctgtgtcaggctttc

SEQ ID NO: 4364 - DNA, 16 bp, Homo sapiens
  Hammerhead ribozyme recognition site for cyclin B1
aagcagtcagaccaaa

SEQ ID NO: 4365 - DNA, 16 bp, Homo sapiens
  Hammerhead ribozyme recognition site for cyclin B1
actgggtcgggaagtc

SEQ ID NO: 4366 - DNA, 16 bp, Homo sapiens
  Hammerhead ribozyme recognition site for cyclin B1
tgactgtctccattat

SEQ ID NO: 4367 - DNA, 16 bp, Homo sapiens
  Hammerhead ribozyme recognition site for PCNA
gcctggtccagggctc

SEQ ID NO: 4368 - DNA, 16 bp, Homo sapiens
  Hammerhead ribozyme recognition site for PCNA
gactcgtcccacgtct

SEQ ID NO: 4369 - DNA, 16 bp, Homo sapiens
  Hammerhead ribozyme recognition site for PCNA
ctgcggtctgagggct

SEQ ID NO: 4370 - DNA, 16 bp, Homo sapiens
  Hammerhead ribozyme recognition site for PCNA
tttctgtcaccaaatt

SEQ ID NO: 4371 - DNA, 16 bp, Homo sapiens
  Hammerhead ribozyme recognition site for lysyl oxidase
ccgccgtccctggtgc

SEQ ID NO: 4372 - DNA, 16 bp, Homo sapiens
  Hammerhead ribozyme recognition site for lysyl oxidase
ctggagtcaccgctgg

SEQ ID NO: 4373 - DNA, 16 bp, Homo sapiens
  Hammerhead ribozyme recognition site for lysyl oxidase
cgcccgtcactggttc

SEQ ID NO: 4374 - DNA, 16 bp, Homo sapiens
  Hammerhead ribozyme recognition site for lysyl oxidase
gtacggtctcccagac

SEQ ID NO: 4375 - DNA, 16 bp, Homo sapiens
  Hammerhead ribozyme recognition site for lysyl oxidase
caggcgtccacgtacg

SEQ ID NO: 4376 - DNA, 16 bp, Homo sapiens
  Hammerhead ribozyme recognition site for lysyl oxidase
aaactgtctggccagt

SEQ ID NO: 4377 - DNA, 16 bp, Homo sapiens
  Hammerhead ribozyme recognition site for lysyl oxidase
tttctgtcttgaagac

SEQ ID NO: 4378 - DNA, 52 bp, Homo sapiens
  Representative Haipin Ribozyme
aacgagctagaaccagaccagagaaacacacgttgtggtatattacctggta

SEQ ID NO: 4379 - DNA, 52 bp, Homo sapiens
  Representative Haipin Ribozyme
ctggctcaagaactggaccagagaaacacacgttgtggtatattacctggta

SEQ ID NO: 4380 - DNA, 52 bp, Homo sapiens
  Representative Haipin Ribozyme
ccagcggtagaaccagaccagagaaacacacgttgtggtatattacctggta

SEQ ID NO: 4381 - DNA, 52 bp, Homo sapiens
  Representative Haipin Ribozyme
agccctcaagaagcagaccagagaaacacacgttgtggtatattacctggta

SEQ ID NO: 4382 - DNA, 40 bp, Artificial Sequence
  Synthetic human hammerhead ribozymes targeting PCNA
gagccctgcugaugagcaattttttgcgaaaaccaggcgc

SEQ ID NO: 4383 - DNA, 38 bp, Artificial Sequence
  Synthetic human hammerhead ribozymes targeting PCNA
agcccugcugaugaggccgtaaggccgaaaccaggcgc

SEQ ID NO: 4384 - DNA, 38 bp, Artificial Sequence; identical to SEQ ID NO: 4383
  Synthetic human hammerhead ribozymes targeting PCNA

SEQ ID NO: 4385 - DNA, 39 bp, Homo sapien
  modified_base (1..8): General structure of chimeric DNA/RNA ribozyme
  modified_base (33..39): Where n is a, c, g or t; Where n is a, c, g or t
nnnnnnnncugaugagcaattttttgcgaaaannnnnnn

SEQ ID NO: 4386 - DNA, 16 bp, Homo sapiens
  modified_base (1..8): General target RNA of chimeric DNA/RNA ribozyme
  modified_base (11..16): Where n is a, c, g or u; Where n is a, c, g or u
nnnnnnnnhunnnnnn

SEQ ID NO: 4387 - DNA, 52 bp, Homo sapiens
  modified_base (1..8): Representative hairpin ribozyme
  modified_base (13..16): Where n is a, c, g, t or u; Where n is a, c, g, t or u
nnnnnnnnagaannnnaccagagaaacacacguugugguauauuaccuggua

SEQ ID NO: 4388 - DNA, 16 bp, Homo sapiens
  modified_base (1..3): Target RNA of representative hairpin ribozyme
  modified_base (5): Where n is a, c, g, or u
  modified_base (8..16): Where n is a, c, g, or u; Where n is a, c, g, or u
nnnsngucnnnnnnnn

SEQ ID NO: 4389 - DNA, 16 bp, Homo sapien
  MMP-1 ribozyme recognition site
gtggtgtctcacagct

SEQ ID NO: 4390 - DNA, 16 bp, Homo sapien
  MMP-1 ribozyme recognition site
agtttgtcctcactga

SEQ ID NO: 4391 - DNA, 16 bp, Homo sapien
  MMP-1 ribozyme recognition site
ccaaggtctctgaggg

SEQ ID NO: 4392 - DNA, 16 bp, Homo sapien
  MMP-1 ribozyme recognition site
tgagggtcaagcagac

SEQ ID NO: 4393 - DNA, 16 bp, Homo sapien
  MMP-1 ribozyme recognition site
atcctgtccagcccat

SEQ ID NO: 4394 - DNA, 16 bp, Homo sapien
  MMP-1 ribozyme recognition site
tgtgagtccaaagaag

SEQ ID NO: 4395 - DNA, 16 bp, Homo sapien
  MMP-1 ribozyme recognition site
gaactgtctattttct

SEQ ID NO: 4396 - DNA, 16 bp, Homo sapien
  MMP-1 ribozyme recognition site
tctcagtcatttttaa

SEQ ID NO: 4397 - DNA, 16 bp, Homo sapien
  MMP-1 ribozyme recognition site
ctagagtcactgatac

SEQ ID NO: 4398 - DNA, 16 bp, Homo sapien
  MMP-1 ribozyme recognition site
catgagtctttgccgg

SEQ ID NO: 4399 - DNA, 16 bp, Homo sapien
  IL-1 beta ribozyme recognition site
caagtgtctgaagcag

SEQ ID NO: 4400 - DNA, 16 bp, Homo sapien
  IL-1 beta ribozyme recognition site
gccgcgtcagttgttg

SEQ ID NO: 4401 - DNA, 16 bp, Homo sapien
  IL-1 beta ribozyme recognition site
gtgatgtctggtccat

SEQ ID NO: 4402 - DNA, 16 bp, Homo sapien
  IL-1 beta ribozyme recognition site
gtctggtccatatgaa

SEQ ID NO: 4403 - DNA, 16 bp, Homo sapien
  IL-1 beta ribozyme recognition site
tccatgtcctttgtac

SEQ ID NO: 4404 - DNA, 16 bp, Homo sapien
  IL-1 beta ribozyme recognition site
tacctgtcctgcgtgt

SEQ ID NO: 4405 - DNA, 16 bp, Homo sapien
  IL-1 beta ribozyme recognition site
gatttgtcttcaacaa

SEQ ID NO: 4406 - DNA, 16 bp, Homo sapien
  IL-1 beta ribozyme recognition site
tttgagtctgcccagt

SEQ ID NO: 4407 - DNA, 16 bp, Homo sapien
  IL-1 beta ribozyme recognition site
tgcccgtcttcctggg

SEQ ID NO: 4408 - DNA, 16 bp, Homo sapien
  IL-1 beta ribozyme recognition site
tttgtgtcttcctaaa

SEQ ID NO: 4409 - DNA, 16 bp, Homo sapien
  IL-1 beta ribozyme recognition site
agagagtcctgtgctg

SEQ ID NO: 4410 - DNA, 16 bp, Homo sapien
  IL-1 beta ribozyme recognition site
ctgttgtctacaccaa

SEQ ID NO: 4411 - DNA, 16 bp, Homo sapien
  VEGF ribozyme recognition site
ctgctgtcttgggtgc

SEQ ID NO: 4412 - DNA, 16 bp, Homo sapien
  VEGF ribozyme recognition site
aagtggtcccaggctg

SEQ ID NO: 4413 - DNA, 16 bp, Homo sapien
  VEGF ribozyme recognition site
gaggagtccaacatca

SEQ ID NO: 4414 - DNA, 21 bp, Homo sapien
  IL2 ribozyme recognition site
caactcctgtcttgcattgca

SEQ ID NO: 4415 - DNA, 21 bp, Homo sapien
  IL2 ribozyme recognition site
ttgcacttgtcacaaacagtg

SEQ ID NO: 4416 - DNA, 21 bp, Homo sapien
  IL2 ribozyme recognition site
gcttcagtgtctagaagaaga

SEQ ID NO: 4417 - DNA, 21 bp, Homo sapien
  IL2 ribozyme recognition site
taccttttgtcaaagcatcat

SEQ ID NO: 4418 - DNA, 21 bp, Homo sapien
  INF-gamma ribozyme recognition site
gccaaattgtctccttttact

SEQ ID NO: 4419 - DNA, 21 bp, Homo sapien
  INF-gamma ribozyme recognition site
gctgaactgtcgccagcagct

SEQ ID NO: 4420 - DNA, 21 bp, Homo sapien
  INF-gamma ribozyme recognition site
aaaaaggagtcagatgctgtt

SEQ ID NO: 4421 - DNA, 22 bp, Homo sapien
  INF-gamma ribozyme recognition site
gtaatggttgtcctgcctgcaa

SEQ ID NO: 4422 - DNA, 21 bp, Homo sapien
  INF-gamma ribozyme recognition site
ctgtgactgtctcacttaatc

SEQ ID NO: 4423 - DNA, 21 bp, Homo sapien
  INF-gamma ribozyme recognition site
ttgaatgtgtcaggtgaccct

SEQ ID NO: 4424 - DNA, 21 bp, Homo sapien
  IL-1 alpha ribozyme recognition site
gcgtttgagtcagcaaagaag

SEQ ID NO: 4425 - DNA, 21 bp, Homo sapien
  IL-1 alpha ribozyme recognition site
gatcatctgtctctgaatcag

SEQ ID NO: 4426 - DNA, 21 bp, Homo sapien
  IL-1 alpha ribozyme recognition site
caatctgtgtctctgagtatc

SEQ ID NO: 4427 - DNA, 21 bp, Homo sapien
  IL-1 alpha ribozyme recognition site
ggtctggagtctcacttgtct

SEQ ID NO: 4428 - DNA, 21 bp, Homo sapien
  IL-1 alpha ribozyme recognition site
tctcacttgtctcacttgtgc

SEQ ID NO: 4429 - DNA, 21 bp, Homo sapien
  IL-1 alpha ribozyme recognition site
tactgttagtcatttgctgag

SEQ ID NO: 4430 - DNA, 21 bp, Homo sapien
  IL-1 alpha ribozyme recognition site
gcattttggtccaagttgtgc

SEQ ID NO: 4431 - DNA, 21 bp, Homo sapien
  IL-1 alpha ribozyme recognition site
agtaattggtccgatctttga

SEQ ID NO: 4432 - DNA, 21 bp, Homo sapien
  IL-1 alpha ribozyme recognition site
ccgtgctggtctcgaacttct

SEQ ID NO: 4433 - DNA, 21 bp, Homo sapien
  IL-1 alpha ribozyme recognition site
aatcctcagtcagccgtgttt

SEQ ID NO: 4434 - DNA, 18 bp, Homo sapien
  IL-1 alpha ribozyme recognition site
ttcttgtcccaaataaaa

SEQ ID NO: 4435 - DNA, 21 bp, Homo sapien
  IL6 ribozyme recognition site
cgccttcggtccagttgcctt

SEQ ID NO: 4436 - DNA, 21 bp, Homo sapien
  IL6 ribozyme recognition site
catcactggtcttttggagtt

SEQ ID NO: 4437 - DNA, 21 bp, Homo sapien
  IL6 ribozyme recognition site
ttcctgcagtccagcctgagg

SEQ ID NO: 4438 - DNA, 21 bp, Homo sapien
  IL6 ribozyme recognition site
ttcttctggtcagaaacctgt

SEQ ID NO: 4439 - DNA, 21 bp, Homo sapien
  IL6 ribozyme recognition site
agaaacctgtccactgggcac

SEQ ID NO: 4440 - DNA, 21 bp, Homo sapien
  IL8 ribozyme recognition site
ttgtgtgggtctgttgtaggg

SEQ ID NO: 4441 - DNA, 21 bp, Homo sapien
  IL8 ribozyme recognition site
agagctctgtctggaccccaa

SEQ ID NO: 4442 - DNA, 21 bp, Homo sapien
  IL8 ribozyme recognition site
caaccctagtctgctagccag

SEQ ID NO: 4443 - DNA, 21 bp, Homo sapien
  MMP-2 ribozyme recognition site
gccgcgccgtcgcccatcatc

SEQ ID NO: 4444 - DNA, 21 bp, Homo sapien
  MMP-2 ribozyme recognition site
gccaagtggtccgtgtgaagt

SEQ ID NO: 4445 - DNA, 21 bp, Homo sapien
  MMP-2 ribozyme recognition site
cggcttctgtccccatgaagc

SEQ ID NO: 4446 - DNA, 21 bp, Homo sapien
  MMP-2 ribozyme recognition site
ccccctgtgtcttccccttca

SEQ ID NO: 4447 - DNA, 21 bp, Homo sapien
  MMP-2 ribozyme recognition site
gaacttccgtctgtcccagga

SEQ ID NO: 4448 - DNA, 21 bp, Homo sapien
  MMP-2 ribozyme recognition site
ttccgtctgtcccaggatgac

SEQ ID NO: 4449 - DNA, 21 bp, Homo sapien
  MMP-2 ribozyme recognition site
tgggccctgtcactcctgaga

SEQ ID NO: 4450 - DNA, 21 bp, Homo sapien
  MMP-2 ribozyme recognition site
tggatgccgtcgtggacctgc

SEQ ID NO: 4451 - DNA, 21 bp, Homo sapien
  MMP-2 ribozyme recognition site
gggcggcggtcacagctactt

SEQ ID NO: 4452 - DNA, 21 bp, Homo sapien
  MMP-2 ribozyme recognition site
tggagactgtctcaagagggc

SEQ ID NO: 4453 - DNA, 21 bp, Homo sapien
  MMP-2 ribozyme recognition site
ttctttgggtcttgttttttt

SEQ ID NO: 4454 - DNA, 20 bp, Homo sapien
  MMP-3 ribozyme recognition site
atgaagagtcttccaatcct

SEQ ID NO: 4455 - DNA, 21 bp, Homo sapien
  MMP-3 ribozyme recognition site
ggacagtggtcctgttgttaa

SEQ ID NO: 4456 - DNA, 21 bp, Homo sapien
  MMP-3 ribozyme recognition site
tgacgttggtcacttcagaac

SEQ ID NO: 4457 - DNA, 21 bp, Homo sapien
  MMP-3 ribozyme recognition site
ctccctgggtctctttcactc

SEQ ID NO: 4458 - DNA, 21 bp, Homo sapien
  MMP-3 ribozyme recognition site
ttccgcctgtctcaagatgat

SEQ ID NO: 4459 - DNA, 21 bp, Homo sapien
  MMP-3 ribozyme recognition site
ggcattcagtccctctatgga

SEQ ID NO: 4460 - DNA, 21 bp, Homo sapien
  MMP-3 ribozyme recognition site
cggaacctgtccctccagaac

SEQ ID NO: 4461 - DNA, 21 bp, Homo sapien
  MMP-3 ribozyme recognition site
cctgctttgtcctttgatgct

SEQ ID NO: 4462 - DNA, 21 bp, Homo sapien
  MMP-3 ribozyme recognition site
ttgatgctgtcagcactctga

SEQ ID NO: 4463 - DNA, 21 bp, Homo sapien
  MMP-9 ribozyme recognition site
agcccctggtcctggtgctcc

SEQ ID NO: 4464 - DNA, 21 bp, Homo sapien
  MMP-9 ribozyme recognition site
cagcgccagtccacccttgtg

SEQ ID NO: 4465 - DNA, 21 bp, Homo sapien
  MMP-9 ribozyme recognition site
cgtggagagtcgaaatctctg

SEQ ID NO: 4466 - DNA, 21 bp, Homo sapien
  MMP-9 ribozyme recognition site
aagcaactgtccctgcccgag

SEQ ID NO: 4467 - DNA, 21 bp, Homo sapien
  MMP-9 ribozyme recognition site
ggtgcggggtcccagacctgg

SEQ ID NO: 4468 - DNA, 21 bp, Homo sapien
  MMP-9 ribozyme recognition site
cagacatcgtcatccagtttg

SEQ ID NO: 4469 - DNA, 21 bp, Homo sapien
  MMP-9 ribozyme recognition site
agtttggtgtcgcggagcacg

SEQ ID NO: 4470 - DNA, 21 bp, Homo sapien
  MMP-9 ribozyme recognition site
gagttgtggtccctgggcaag

SEQ ID NO: 4471 - DNA, 21 bp, Homo sapien
  MMP-9 ribozyme recognition site
gcaagggcgtcgtggttccaa

SEQ ID NO: 4472 - DNA, 21 bp, Homo sapien
  MMP-9 ribozyme recognition site
caccgacggtcgctccgacgg

SEQ ID NO: 4473 - DNA, 21 bp, Homo sapien
  MMP-9 ribozyme recognition site
cacggacggtcgctccgacgg

SEQ ID NO: 4474 - DNA, 21 bp, Homo sapien
  MMP-9 ribozyme recognition site
agctgtgcgtcttccccttca

SEQ ID NO: 4475 - DNA, 21 bp, Homo sapien
  MMP-9 ribozyme recognition site
cctctatggtcctcgccctga

SEQ ID NO: 4476 - DNA, 21 bp, Homo sapien
  MMP-9 ribozyme recognition site
ccccgacggtctgccccaccg

SEQ ID NO: 4477 - DNA, 21 bp, Homo sapien
  MMP-9 ribozyme recognition site
cccccactgtccacccctcag

SEQ ID NO: 4478 - DNA, 21 bp, Homo sapien
  MMP-9 ribozyme recognition site
gcctttgagtccggtggacga

SEQ ID NO: 4479 - DNA, 21 bp, Homo sapien
  MMP-9 ribozyme recognition site
tggactcggtctttgaggagc

SEQ ID NO: 4480 - DNA, 21 bp, Homo sapien
  MMP-9 ribozyme recognition site
acaggcgcgtcggtgctgggc

SEQ ID NO: 4481 - DNA, 21 bp, Homo sapien
  MMP-9 ribozyme recognition site
cccgaggcgtctggacaagct

SEQ ID NO: 4482 - DNA, 21 bp, Homo sapien
  MMP-9 ribozyme recognition site
gggctcccgtcctgctttgca

SEQ ID NO: 4483 - DNA, 21 bp, Homo sapien
  PDGF A ribozyme recognition site
ccggccgggtcgctcctgaag

SEQ ID NO: 4484 - DNA, 21 bp, Homo sapien
  PDGF A ribozyme recognition site
ccccttccgtccccaccccca

SEQ ID NO: 4485 - DNA, 21 bp, Homo sapien
  PDGF A ribozyme recognition site
cgggcgccgtccgccagctcc

SEQ ID NO: 4486 - DNA, 21 bp, Homo sapien
  PDGF A ribozyme recognition site
ggcccgcagtcagatccacag

SEQ ID NO: 4487 - DNA, 21 bp, Homo sapien
  PDGF A ribozyme recognition site
ctcacggggtccatgccacta

SEQ ID NO: 4488 - DNA, 21 bp, Homo sapien
  PDGF A ribozyme recognition site
aggaagctgtccccgctgtct

SEQ ID NO: 4489 - DNA, 21 bp, Homo sapien
  PDGF A ribozyme recognition site
tccccgctgtctgcaagacca

SEQ ID NO: 4490 - DNA, 21 bp, Homo sapien
  PDGF A ribozyme recognition site
ccaggacggtcatttacgaga

SEQ ID NO: 4491 - DNA, 21 bp, Homo sapien
  PDGF A ribozyme recognition site
tcctcggagtcaggtcgaccc

SEQ ID NO: 4492 - DNA, 21 bp, Homo sapien
  PDGF A ribozyme recognition site
cgagcagtgtcaagtgccagc

SEQ ID NO: 4493 - DNA, 21 bp, Homo sapien
  PDGF A ribozyme recognition site
cctcccgcgtccaccaccgca

SEQ ID NO: 4494 - DNA, 21 bp, Homo sapien
  PDGF A ribozyme recognition site
accgcagcgtcaaggtggcca

SEQ ID NO: 4495 - DNA, 21 bp, Homo sapien
  PDGF A ribozyme recognition site
cctagggagtcaggtaaaaaa

SEQ ID NO: 4496 - DNA, 21 bp, Homo sapien
  PDGF A ribozyme recognition site
agtgtgcggtctttgttctcc

SEQ ID NO: 4497 - DNA, 21 bp, Homo sapien
  PDGF A ribozyme recognition site
aaaactgtgtccgagaacact

SEQ ID NO: 4498 - DNA, 21 bp, Homo sapien
  PDGF A ribozyme recognition site
gcttccttgtcaaaaagagag

SEQ ID NO: 4499 - DNA, 21 bp, Homo sapien
  PDGF B ribozyme recognition site
aggttggagtcccctgggcgc

SEQ ID NO: 4500 - DNA, 21 bp, Homo sapien
  PDGF B ribozyme recognition site
ggcccggagtcggcatgaatc

SEQ ID NO: 4501 - DNA, 21 bp, Homo sapien
  PDGF B ribozyme recognition site
ctcttcctgtctctctgctgc

SEQ ID NO: 4502 - DNA, 21 bp, Homo sapien
  PDGF B ribozyme recognition site
ctacctgcgtctggtcagcgc

SEQ ID NO: 4503 - DNA, 21 bp, Homo sapien
  PDGF B ribozyme recognition site
tgcgtctggtcagcgccgagg

SEQ ID NO: 4504 - DNA, 21 bp, Homo sapien
  PDGF B ribozyme recognition site
tgcgacctgtccaggtgagaa

SEQ ID NO: 4505 - DNA, 21 bp, Homo sapien
  PDGF B ribozyme recognition site
cggtgcgagtccgccggcccc

SEQ ID NO: 4506 - DNA, 21 bp, Homo sapien
  PDGF B ribozyme recognition site
tttccctcgtccgtctgtctc

SEQ ID NO: 4507 - DNA, 21 bp, Homo sapien
  PDGF B ribozyme recognition site
cctcgtccgtctgtctcgatg

SEQ ID NO: 4508 - DNA, 21 bp, Homo sapien
  PDGF B ribozyme recognition site
gtccgtctgtctcgatgcctg

SEQ ID NO: 4509 - DNA, 21 bp, Homo sapien
  PDGF B ribozyme recognition site
ctccacgtgtccgtccaccct

SEQ ID NO: 4510 - DNA, 21 bp, Homo sapien
  PDGF B ribozyme recognition site
acgtgtccgtccacccttcca

SEQ ID NO: 4511 - DNA, 20 bp, Homo sapien
  PDGF B ribozyme recognition site
atcagcgggtctcctcccag

SEQ ID NO: 4512 - DNA, 21 bp, Homo sapien
  PDGF B ribozyme recognition site
ctgatggggtcgctctttggg

SEQ ID NO: 4513 - DNA, 21 bp, Homo sapien
  PDGF B ribozyme recognition site
tgtggactgtcctgaggagcc

SEQ ID NO: 4514 - DNA, 21 bp, Homo sapien
  VEGF hammerhead ribozyme recognition site
tgctgctctacctccaccatg

SEQ ID NO: 4515 - DNA, 20 bp, Homo sapien
  VEGF hammerhead ribozyme recognition site
tcatggatgtctatcagcgc

SEQ ID NO: 4516 - DNA, 19 bp, Homo sapien
  VEGF hammerhead ribozyme recognition site
ggacatcttccaggagtac

SEQ ID NO: 4517 - DNA, 19 bp, Homo sapien
  VEGF hammerhead ribozyme recognition site
gtacatcttcaagccatcc

SEQ ID NO: 4518 - DNA, 19 bp, Homo sapien
  VEGF hammerhead ribozyme recognition site
catgcagattatgcggatc

SEQ ID NO: 4519 - DNA, 19 bp, Homo sapien
  VEGF hammerhead ribozyme recognition site
atcaaacctcaccaaggcc

SEQ ID NO: 4520 - DNA, 19 bp, Homo sapien
  VEGF hammerhead ribozyme recognition site
gatgagcttcctacagcac

SEQ ID NO: 4521 - DNA, 21 bp, Homo sapien
  VEGF hammerhead ribozyme recognition site
agaaaaaaaatcagttcgagg

SEQ ID NO: 4522 - DNA, 19 bp, Homo sapien
  VEGF hammerhead ribozyme recognition site
gcaagaaatcccggtataa

SEQ ID NO: 4523 - DNA, 19 bp, Homo sapien
  VEGF hammerhead ribozyme recognition site
gtacaagatccgcagacgt
